United States Patent Application Publication US 2016/0281171 A1 - sequence listing, part 9

SEQ ID NO: 192316 - DNA, 80 bp, Homo sapiens
atcatcacatcactcttgagtaggaacagagccttcccatcaatttcctacagagagaaggaaatcataatcattaataa

SEQ ID NO: 192317 - DNA, 72 bp, Homo sapiens
attcaaaggcattacggcaggaaaaccggatcaaaagatacattacatgttgcctgaagaggtcggcgaggg

SEQ ID NO: 192318 - DNA, 73 bp, Homo sapiens
attacggcaggaaaaccggatcaaaagatacattacatgttgcctgaagaggtcggcgagggggcctgatatc

SEQ ID NO: 192319 - DNA, 77 bp, Homo sapiens
gaaaaccggatcaaaagatacattacatgttgcctgaagaggtcggcgagggggcctgatatctgaggatctgtatg

SEQ ID NO: 192320 - DNA, 78 bp, Homo sapiens
atcaaaagatacattacatgttgcctgaagaggtcggcgagggggcctgatatctgaggatctgtatgtttcataaac

SEQ ID NO: 192321 - DNA, 79 bp, Homo sapiens
atacattacatgttgcctgaagaggtcggcgagggggcctgatatctgaggatctgtatgtttcataaactgtatcact

SEQ ID NO: 192322 - DNA, 81 bp, Homo sapiens
atgttgcctgaagaggtcggcgagggggcctgatatctgaggatctgtatgtttcataaactgtatcacttcatccacaga

SEQ ID NO: 192323 - DNA, 78 bp, Homo sapiens
aggtcggcgagggggcctgatatctgaggatctgtatgtttcataaactgtatcacttcatccacagaccaggttgaa

SEQ ID NO: 192324 - DNA, 78 bp, Homo sapiens
ggggcctgatatctgaggatctgtatgtttcataaactgtatcacttcatccacagaccaggttgaagggtccttaga

SEQ ID NO: 192325 - DNA, 77 bp, Homo sapiens
atatctgaggatctgtatgtttcataaactgtatcacttcatccacagaccaggttgaagggtccttagagaagcct

SEQ ID NO: 192326 - DNA, 75 bp, Homo sapiens
atctgtatgtttcataaactgtatcacttcatccacagaccaggttgaagggtccttagagaagccttgtttcag

SEQ ID NO: 192327 - DNA, 75 bp, Homo sapiens
tgtttcataaactgtatcacttcatccacagaccaggttgaagggtccttagagaagccttgtttcaggacactg

SEQ ID NO: 192328 - DNA, 77 bp, Homo sapiens
tatcacttcatccacagaccaggttgaagggtccttagagaagccttgtttcaggacactgggatcaggtacagcta

SEQ ID NO: 192329 - DNA, 76 bp, Homo sapiens
ttcatccacagaccaggttgaagggtccttagagaagccttgtttcaggacactgggatcaggtacagctatataa

SEQ ID NO: 192330 - DNA, 74 bp, Homo sapiens
aggttgaagggtccttagagaagccttgtttcaggacactgggatcaggtacagctatataacttggagcttca

SEQ ID NO: 192331 - DNA, 73 bp, Homo sapiens
aagggtccttagagaagccttgtttcaggacactgggatcaggtacagctatataacttggagcttcaatggg

SEQ ID NO: 192332 - DNA, 72 bp, Homo sapiens
agagaagccttgtttcaggacactgggatcaggtacagctatataacttggagcttcaatgggggggaaaaa

SEQ ID NO: 192333 - DNA, 74 bp, Homo sapiens
tgtttcaggacactgggatcaggtacagctatataacttggagcttcaatgggggggaaaaaagacaaatcata

SEQ ID NO: 192334 - DNA, 74 bp, Homo sapiens
tcaaggcaaaagacaaacacattgagagtcactatttttgaacataccttcacttttcctctgcatttggaatt

SEQ ID NO: 192335 - DNA, 74 bp, Homo sapiens
gacaaacacattgagagtcactatttttgaacataccttcacttttcctctgcatttggaatttaacttcatgg

SEQ ID NO: 192336 - DNA, 73 bp, Homo sapiens
acacattgagagtcactatttttgaacataccttcacttttcctctgcatttggaatttaacttcatggggac

SEQ ID NO: 192337 - DNA, 72 bp, Homo sapiens
agtcactatttttgaacataccttcacttttcctctgcatttggaatttaacttcatggggactgctcttgg

SEQ ID NO: 192338 - DNA, 73 bp, Homo sapiens
tttgaacataccttcacttttcctctgcatttggaatttaacttcatggggactgctcttgggggatatgtcc

SEQ ID NO: 192339 - DNA, 72 bp, Homo sapiens
acttttcctctgcatttggaatttaacttcatggggactgctcttgggggatatgtccccaactagtggtga

SEQ ID NO: 192340 - DNA, 73 bp, Homo sapiens
ctctgcatttggaatttaacttcatggggactgctcttgggggatatgtccccaactagtggtgaacttgtgg

SEQ ID NO: 192341 - DNA, 74 bp, Homo sapiens
ttggaatttaacttcatggggactgctcttgggggatatgtccccaactagtggtgaacttgtggtgcctggca

SEQ ID NO: 192342 - DNA, 73 bp, Homo sapiens
atggggactgctcttgggggatatgtccccaactagtggtgaacttgtggtgcctggcacacttcgagaaaaa

SEQ ID NO: 192343 - DNA, 73 bp, Homo sapiens
actgctcttgggggatatgtccccaactagtggtgaacttgtggtgcctggcacacttcgagaaaaatcctgg

SEQ ID NO: 192344 - DNA, 75 bp, Homo sapiens
atatgtccccaactagtggtgaacttgtggtgcctggcacacttcgagaaaaatcctgggagactgaagtatgaa

SEQ ID NO: 192345 - DNA, 76 bp, Homo sapiens
aactagtggtgaacttgtggtgcctggcacacttcgagaaaaatcctgggagactgaagtatgaatatacatagga

SEQ ID NO: 192346 - DNA, 78 bp, Homo sapiens
tggtgaacttgtggtgcctggcacacttcgagaaaaatcctgggagactgaagtatgaatatacataggatttctaca

SEQ ID NO: 192347 - DNA, 79 bp, Homo sapiens
tgcctggcacacttcgagaaaaatcctgggagactgaagtatgaatatacataggatttctacaggcaggattcaaata

SEQ ID NO: 192348 - DNA, 74 bp, Homo sapiens
acacttcgagaaaaatcctgggagactgaagtatgaatatacataggatttctacaggcaggattcaaataatt

SEQ ID NO: 192349 - DNA, 75 bp, Homo sapiens
gagaaaaatcctgggagactgaagtatgaatatacataggatttctacaggcaggattcaaataatttcctgaat

SEQ ID NO: 192350 - DNA, 80 bp, Homo sapiens
gagactgaagtatgaatatacataggatttctacaggcaggattcaaataatttcctgaatttagtgatgagctcttaga

SEQ ID NO: 192351 - DNA, 80 bp, Homo sapiens
gtatgaatatacataggatttctacaggcaggattcaaataatttcctgaatttagtgatgagctcttagaatcttctga

SEQ ID NO: 192352 - DNA, 78 bp, Homo sapiens
tacataggatttctacaggcaggattcaaataatttcctgaatttagtgatgagctcttagaatcttctgaaagattc

SEQ ID NO: 192353 - DNA, 76 bp, Homo sapiens
atttctacaggcaggattcaaataatttcctgaatttagtgatgagctcttagaatcttctgaaagattctcctct

SEQ ID NO: 192354 - DNA, 75 bp, Homo sapiens
attcaaataatttcctgaatttagtgatgagctcttagaatcttctgaaagattctcctctttgggaatggcact

SEQ ID NO: 192355 - DNA, 74 bp, Homo sapiens
aataatttcctgaatttagtgatgagctcttagaatcttctgaaagattctcctctttgggaatggcacttccc

SEQ ID NO: 192356 - DNA, 75 bp, Homo sapiens
aatttagtgatgagctcttagaatcttctgaaagattctcctctttgggaatggcacttcccccagcaaacaatg

SEQ ID NO: 192357 - DNA, 75 bp, Homo sapiens
atgagctcttagaatcttctgaaagattctcctctttgggaatggcacttcccccagcaaacaatggttctccta

SEQ ID NO: 192358 - DNA, 71 bp, Homo sapiens
tcttctgaaagattctcctctttgggaatggcacttcccccagcaaacaatggttctcctacagggaaaaa

SEQ ID NO: 192359 - DNA, 69 bp, Homo sapiens
aaagattctcctctttgggaatggcacttcccccagcaaacaatggttctcctacagggaaaaagacaa

SEQ ID NO: 192360 - DNA, 71 bp, Homo sapiens
tttgggaatggcacttcccccagcaaacaatggttctcctacagggaaaaagacaaaggaggctatcttca

SEQ ID NO: 192361 - DNA, 70 bp, Homo sapiens
agagaaacatttcttcccagtcctgggaggtgtaaatgctatttaccttcagacgcatactcctttgttt

SEQ ID NO: 192362 - DNA, 69 bp, Homo sapiens
aacatttcttcccagtcctgggaggtgtaaatgctatttaccttcagacgcatactcctttgttttggg

SEQ ID NO: 192363 - DNA, 72 bp, Homo sapiens
agtcctgggaggtgtaaatgctatttaccttcagacgcatactcctttgttttggggagcttaggagagaga

SEQ ID NO: 192364 - DNA, 74 bp, Homo sapiens
tgtaaatgctatttaccttcagacgcatactcctttgttttggggagcttaggagagagaggaacaacatatgg

SEQ ID NO: 192365 - DNA, 72 bp, Homo sapiens
tatttaccttcagacgcatactcctttgttttggggagcttaggagagagaggaacaacatatggtacagtt

SEQ ID NO: 192366 - DNA, 77 bp, Homo sapiens
ttcagacgcatactcctttgttttggggagcttaggagagagaggaacaacatatggtacagtttgctgaggagatc

SEQ ID NO: 192367 - DNA, 73 bp, Homo sapiens
atactcctttgttttggggagcttaggagagagaggaacaacatatggtacagtttgctgaggagatcgtttg

SEQ ID NO: 192368 - DNA, 74 bp, Homo sapiens
ttttggggagcttaggagagagaggaacaacatatggtacagtttgctgaggagatcgtttggtgctttgcctt

SEQ ID NO: 192369 - DNA, 77 bp, Homo sapiens
ttaggagagagaggaacaacatatggtacagtttgctgaggagatcgtttggtgctttgcctttctgttacatcttc

SEQ ID NO: 192370 - DNA, 75 bp, Homo sapiens
aggaacaacatatggtacagtttgctgaggagatcgtttggtgctttgcctttctgttacatcttcttttgctgt

SEQ ID NO: 192371 - DNA, 75 bp, Homo sapiens
aacatatggtacagtttgctgaggagatcgtttggtgctttgcctttctgttacatcttcttttgctgttttcaa

SEQ ID NO: 192372 - DNA, 72 bp, Homo sapiens
acagtttgctgaggagatcgtttggtgctttgcctttctgttacatcttcttttgctgttttcaaagaaaaa

SEQ ID NO: 192373 - DNA, 70 bp, Homo sapiens
agatcgtttggtgctttgcctttctgttacatcttcttttgctgttttcaaagaaaaaacagttgtctgt

SEQ ID NO: 192374 - DNA, 80 bp, Homo sapiens
acaagattctcaagtgaaacagaagtgtaagagtttacattttctctcacctgactgatttttatcatgctctgcagagc

SEQ ID NO: 192375 - DNA, 81 bp, Homo sapiens
aagtgaaacagaagtgtaagagtttacattttctctcacctgactgatttttatcatgctctgcagagctgtgagtatgac

SEQ ID NO: 192376 - DNA, 80 bp, Homo sapiens
agtgtaagagtttacattttctctcacctgactgatttttatcatgctctgcagagctgtgagtatgacccctggaagaa

SEQ ID NO: 192377 - DNA, 78 bp, Homo sapiens
agtttacattttctctcacctgactgatttttatcatgctctgcagagctgtgagtatgacccctggaagaactaaaa

SEQ ID NO: 192378 - DNA, 81 bp, Homo sapiens
tctcacctgactgatttttatcatgctctgcagagctgtgagtatgacccctggaagaactaaaaggctggctactcaaaa

SEQ ID NO: 192379 - DNA, 77 bp, Homo sapiens
actgatttttatcatgctctgcagagctgtgagtatgacccctggaagaactaaaaggctggctactcaaaaggtta

SEQ ID NO: 192380 - DNA, 81 bp, Homo sapiens
ttttatcatgctctgcagagctgtgagtatgacccctggaagaactaaaaggctggctactcaaaaggttatcacactgca

SEQ ID NO: 192381 - DNA, 79 bp, Homo sapiens
cagagctgtgagtatgacccctggaagaactaaaaggctggctactcaaaaggttatcacactgcagactgtggcagaa

SEQ ID NO: 192382 - DNA, 76 bp, Homo sapiens
agtatgacccctggaagaactaaaaggctggctactcaaaaggttatcacactgcagactgtggcagaagttctca

SEQ ID NO: 192383 - DNA, 76 bp, Homo sapiens
ctggaagaactaaaaggctggctactcaaaaggttatcacactgcagactgtggcagaagttctcaagaaagcgaa

SEQ ID NO: 192384 - DNA, 76 bp, Homo sapiens
aactaaaaggctggctactcaaaaggttatcacactgcagactgtggcagaagttctcaagaaagcgaagagcaaa

SEQ ID NO: 192385 - DNA, 84 bp, Homo sapiens
tggctactcaaaaggttatcacactgcagactgtggcagaagttctcaagaaagcgaagagcaaatgatgcactgttcactgga

SEQ ID NO: 192386 - DNA, 81 bp, Homo sapiens
aaaaggttatcacactgcagactgtggcagaagttctcaagaaagcgaagagcaaatgatgcactgttcactggagggagc

SEQ ID NO: 192387 - DNA, 83 bp, Homo sapiens
actgcagactgtggcagaagttctcaagaaagcgaagagcaaatgatgcactgttcactggagggagctggatggaatgagtt

SEQ ID NO: 192388 - DNA, 81 bp, Homo sapiens
agactgtggcagaagttctcaagaaagcgaagagcaaatgatgcactgttcactggagggagctggatggaatgagtttcc

SEQ ID NO: 192389 - DNA, 79 bp, Homo sapiens
agaagttctcaagaaagcgaagagcaaatgatgcactgttcactggagggagctggatggaatgagtttccccatcaaa

SEQ ID NO: 192390 - DNA, 78 bp, Homo sapiens
aagaaagcgaagagcaaatgatgcactgttcactggagggagctggatggaatgagtttccccatcaaaggaggctat

SEQ ID NO: 192391 - DNA, 74 bp, Homo sapiens
aaatgatgcactgttcactggagggagctggatggaatgagtttccccatcaaaggaggctattgggggaaaaa

SEQ ID NO: 192392 - DNA, 72 bp, Homo sapiens
atgcactgttcactggagggagctggatggaatgagtttccccatcaaaggaggctattgggggaaaaaaaa

SEQ ID NO: 192393 - DNA, 71 bp, Homo sapiens
tggagggagctggatggaatgagtttccccatcaaaggaggctattgggggaaaaaaaaggatgtcagtaa

SEQ ID NO: 192394 - DNA, 72 bp, Homo sapiens
ggaagggggaagggactgaattagacaatgtattagataagtataccagttatcacttctcctccacgatta

SEQ ID NO: 192395 - DNA, 76 bp, Homo sapiens
agggactgaattagacaatgtattagataagtataccagttatcacttctcctccacgattatctggcttcaggta

SEQ ID NO: 192396 - DNA, 75 bp, Homo sapiens
attagacaatgtattagataagtataccagttatcacttctcctccacgattatctggcttcaggtatccaaaaa

SEQ ID NO: 192397 - DNA, 73 bp, Homo sapiens
atgtattagataagtataccagttatcacttctcctccacgattatctggcttcaggtatccaaaaacagttt

SEQ ID NO: 192398 - DNA, 72 bp, Homo sapiens
ataagtataccagttatcacttctcctccacgattatctggcttcaggtatccaaaaacagttttagtttca

SEQ ID NO: 192399 - DNA, 72 bp, Homo sapiens
agttatcacttctcctccacgattatctggcttcaggtatccaaaaacagttttagtttcaagggcacaatc

SEQ ID NO: 192400 - DNA, 73 bp, Homo sapiens
cttctcctccacgattatctggcttcaggtatccaaaaacagttttagtttcaagggcacaatccacacaggc

SEQ ID NO: 192401 - DNA, 74 bp, Homo sapiens
acgattatctggcttcaggtatccaaaaacagttttagtttcaagggcacaatccacacaggcctgcacaatcc

SEQ ID NO: 192402 - DNA, 75 bp, Homo sapiens
tcaggtatccaaaaacagttttagtttcaagggcacaatccacacaggcctgcacaatccggcgaagcaccacat

SEQ ID NO: 192403 - DNA, 72 bp, Homo sapiens
aaaaacagttttagtttcaagggcacaatccacacaggcctgcacaatccggcgaagcaccacattcaccgg

SEQ ID NO: 192404 - DNA, 72 bp, Homo sapiens
agttttagtttcaagggcacaatccacacaggcctgcacaatccggcgaagcaccacattcaccgggcccgg

SEQ ID NO: 192405 - DNA, 74 bp, Homo sapiens
aagggcacaatccacacaggcctgcacaatccggcgaagcaccacattcaccgggcccgggccgaagtggtcag

SEQ ID NO: 192406 - DNA, 78 bp, Homo sapiens
acacaggcctgcacaatccggcgaagcaccacattcaccgggcccgggccgaagtggtcaggcagctgctggattctc

SEQ ID NO: 192407 - DNA, 79 bp, Homo sapiens
tgcacaatccggcgaagcaccacattcaccgggcccgggccgaagtggtcaggcagctgctggattctcttgggatcca

SEQ ID NO: 192408 - DNA, 74 bp, Homo sapiens
acattcaccgggcccgggccgaagtggtcaggcagctgctggattctcttgggatccagatgagggccaaagtt

SEQ ID NO: 192409 - DNA, 75 bp, Homo sapiens
ggcccgggccgaagtggtcaggcagctgctggattctcttgggatccagatgagggccaaagtttccatgtttgt

SEQ ID NO: 192410 - DNA, 80 bp, Homo sapiens
gaagtggtcaggcagctgctggattctcttgggatccagatgagggccaaagtttccatgtttgtttacatagacacaga

SEQ ID NO: 192411 - DNA, 79 bp, Homo sapiens
aggcagctgctggattctcttgggatccagatgagggccaaagtttccatgtttgtttacatagacacagacttgagaa

SEQ ID NO: 192412 - DNA, 76 bp, Homo sapiens
ctgctggattctcttgggatccagatgagggccaaagtttccatgtttgtttacatagacacagacttgagaaaaa

SEQ ID NO: 192413 - DNA, 79 bp, Homo sapiens
tgggatccagatgagggccaaagtttccatgtttgtttacatagacacagacttgagaaaaaatgcgtatgcatacata

SEQ ID NO: 192414 - DNA, 78 bp, Homo sapiens
agatgagggccaaagtttccatgtttgtttacatagacacagacttgagaaaaaatgcgtatgcatacataacaatga

SEQ ID NO: 192415 - DNA, 72 bp, Homo sapiens
gataaaagattagtaattctatactatttttaaaatatgaatttacctgtagacatcactattttacatggc

SEQ ID NO: 192416 - DNA, 74 bp, Homo sapiens
tagtaattctatactatttttaaaatatgaatttacctgtagacatcactattttacatggcccagaagcgaca

SEQ ID NO: 192417 - DNA, 74 bp, Homo sapiens
ctatactatttttaaaatatgaatttacctgtagacatcactattttacatggcccagaagcgacatctttata

SEQ ID NO: 192418 - DNA, 77 bp, Homo sapiens
taaaatatgaatttacctgtagacatcactattttacatggcccagaagcgacatctttatataacatgccacggtc

SEQ ID NO: 192419 - DNA, 80 bp, Homo sapiens
tatgaatttacctgtagacatcactattttacatggcccagaagcgacatctttatataacatgccacggtctctggtca

SEQ ID NO: 192420 - DNA, 80 bp, Homo sapiens
tagacatcactattttacatggcccagaagcgacatctttatataacatgccacggtctctggtcagcgattttagagaa

SEQ ID NO: 192421 - DNA, 80 bp, Homo sapiens
actattttacatggcccagaagcgacatctttatataacatgccacggtctctggtcagcgattttagagaagctgcaga

SEQ ID NO: 192422 - DNA, 84 bp, Homo sapiens
atggcccagaagcgacatctttatataacatgccacggtctctggtcagcgattttagagaagctgcagatgtagaacatatca

SEQ ID NO: 192423 - DNA, 82 bp, Homo sapiens
aagcgacatctttatataacatgccacggtctctggtcagcgattttagagaagctgcagatgtagaacatatcacgggcaa

SEQ ID NO: 192424 - DNA, 78 bp, Homo sapiens
ttatataacatgccacggtctctggtcagcgattttagagaagctgcagatgtagaacatatcacgggcaaaggtttt

SEQ ID NO: 192425 - DNA, 75 bp, Homo sapiens
cacggtctctggtcagcgattttagagaagctgcagatgtagaacatatcacgggcaaaggtttttcctgttaaa

SEQ ID NO: 192426 - DNA, 74 bp, Homo sapiens
tctggtcagcgattttagagaagctgcagatgtagaacatatcacgggcaaaggtttttcctgttaaaaacaaa

SEQ ID NO: 192427 - DNA, 69 bp, Homo sapiens
attttagagaagctgcagatgtagaacatatcacgggcaaaggtttttcctgttaaaaacaaagggaaa

SEQ ID NO: 192428 - DNA, 68 bp, Homo sapiens
agaagctgcagatgtagaacatatcacgggcaaaggtttttcctgttaaaaacaaagggaaaaaaaca

SEQ ID NO: 192429 - DNA, 67 bp, Homo sapiens
ggcactataaaaacctataatacaaattaggaggacatacaactaaccttttttcctgagtttggac

SEQ ID NO: 192430 - DNA, 63 bp, Homo sapiens
aaacctataatacaaattaggaggacatacaactaaccttttttcctgagtttggaccttttt

SEQ ID NO: 192431 - DNA, 66 bp, Homo sapiens
atacaaattaggaggacatacaactaaccttttttcctgagtttggaccttttttccttggtgtga

SEQ ID NO: 192432 - DNA, 65 bp, Homo sapiens
ttaggaggacatacaactaaccttttttcctgagtttggaccttttttccttggtgtgatatttt

SEQ ID NO: 192433 - DNA, 65 bp, Homo sapiens
actaaccttttttcctgagtttggaccttttttccttggtgtgatatttttaacagaactgctcc

SEQ ID NO: 192434 - DNA, 65 bp, Homo sapiens
ttttttcctgagtttggaccttttttccttggtgtgatatttttaacagaactgctccttttggg

SEQ ID NO: 192435 - DNA, 67 bp, Homo sapiens
agtttggaccttttttccttggtgtgatatttttaacagaactgctccttttggggactgcagtagg

SEQ ID NO: 192436 - DNA, 69 bp, Homo sapiens
tttccttggtgtgatatttttaacagaactgctccttttggggactgcagtaggtccaggtggtttaat

SEQ ID NO: 192437 - DNA, 72 bp, Homo sapiens
gtgatatttttaacagaactgctccttttggggactgcagtaggtccaggtggtttaattcgacttgatctc

SEQ ID NO: 192438 - DNA, 71 bp, Homo sapiens
atttttaacagaactgctccttttggggactgcagtaggtccaggtggtttaattcgacttgatctcctga

SEQ ID NO: 192439 - DNA, 82 bp, Homo sapiens
tgatctcctgacctgctgtgttggtaatattagagtagttttctgtggagactgcattgaatgctggcttgcttcggaagga

SEQ ID NO: 192440 - DNA, 78 bp, Homo sapiens
acctgctgtgttggtaatattagagtagttttctgtggagactgcattgaatgctggcttgcttcggaaggagaagac

SEQ ID NO: 192441 - DNA, 76 bp, Homo sapiens
ttggtaatattagagtagttttctgtggagactgcattgaatgctggcttgcttcggaaggagaagactctgtttt

SEQ ID NO: 192442 - DNA, 78 bp, Homo sapiens
aatattagagtagttttctgtggagactgcattgaatgctggcttgcttcggaaggagaagactctgtttttgctata

SEQ ID NO: 192443 - DNA, 78 bp, Homo sapiens
tagttttctgtggagactgcattgaatgctggcttgcttcggaaggagaagactctgtttttgctatattctttacaa

SEQ ID NO: 192444 - DNA, 77 bp, Homo sapiens
actgcattgaatgctggcttgcttcggaaggagaagactctgtttttgctatattctttacaataggaactgaggaa

SEQ ID NO: 192445 - DNA, 74 bp, Homo sapiens
attgaatgctggcttgcttcggaaggagaagactctgtttttgctatattctttacaataggaactgaggaaaa

SEQ ID NO: 192446 - DNA, 71 bp, Homo sapiens
ggcttgcttcggaaggagaagactctgtttttgctatattctttacaataggaactgaggaaaaaaataca

SEQ ID NO: 192447 - DNA, 70 bp, Homo sapiens
ccacacttcaattacaatataaaaaaacttttgcagtaattcgtacctttatcaatattccagagaaaca

SEQ ID NO: 192448 - DNA, 69 bp, Homo sapiens
attacaatataaaaaaacttttgcagtaattcgtacctttatcaatattccagagaaacaagttgttgc

SEQ ID NO: 192449 - DNA, 67 bp, Homo sapiens
ataaaaaaacttttgcagtaattcgtacctttatcaatattccagagaaacaagttgttgctgtttt

SEQ ID NO: 192450 - DNA, 70 bp, Homo sapiens
ttgcagtaattcgtacctttatcaatattccagagaaacaagttgttgctgtttttaccgttaaggtgat

SEQ ID NO: 192451 - DNA, 68 bp, Homo sapiens
tcgtacctttatcaatattccagagaaacaagttgttgctgtttttaccgttaaggtgatttaggttc

SEQ ID NO: 192452 - DNA, 70 bp, Homo sapiens
atcaatattccagagaaacaagttgttgctgtttttaccgttaaggtgatttaggttccaaatgatagga

SEQ ID NO: 192453 - DNA, 69 bp, Homo sapiens
ttccagagaaacaagttgttgctgtttttaccgttaaggtgatttaggttccaaatgataggatagcct

SEQ ID NO: 192454 - DNA, 69 bp, Homo sapiens
aacaagttgttgctgtttttaccgttaaggtgatttaggttccaaatgataggatagccttgctcctta

SEQ ID NO: 192455 - DNA, 68 bp, Homo sapiens
tgtttttaccgttaaggtgatttaggttccaaatgataggatagccttgctccttaccaggaataaaa

SEQ ID NO: 192456 - DNA, 69 bp, Homo sapiens
taccgttaaggtgatttaggttccaaatgataggatagccttgctccttaccaggaataaaattgcctt

SEQ ID NO: 192457 - DNA, 71 bp, Homo sapiens
atttaggttccaaatgataggatagccttgctccttaccaggaataaaattgcctttctggagaaagcaag

SEQ ID NO: 192458 - DNA, 74 bp, Homo sapiens
ttccaaatgataggatagccttgctccttaccaggaataaaattgcctttctggagaaagcaagtcaacaaagc

SEQ ID NO: 192459 - DNA, 74 bp, Homo sapiens
taggatagccttgctccttaccaggaataaaattgcctttctggagaaagcaagtcaacaaagcccatgttgcc

SEQ ID NO: 192460 - DNA, 75 bp, Homo sapiens
tccttaccaggaataaaattgcctttctggagaaagcaagtcaacaaagcccatgttgcctgagcaagcctgaat

SEQ ID NO: 192461 - DNA, 76 bp, Homo sapiens
aataaaattgcctttctggagaaagcaagtcaacaaagcccatgttgcctgagcaagcctgaatttctagcaaatg

SEQ ID NO: 192462 - DNA, 78 bp, Homo sapiens
attgcctttctggagaaagcaagtcaacaaagcccatgttgcctgagcaagcctgaatttctagcaaatggggatgaa

SEQ ID NO: 192463 - DNA, 79 bp, Homo sapiens
agaaagcaagtcaacaaagcccatgttgcctgagcaagcctgaatttctagcaaatggggatgaagctatttgcatttg

SEQ ID NO: 192464 - DNA, 78 bp, Homo sapiens
tcaacaaagcccatgttgcctgagcaagcctgaatttctagcaaatggggatgaagctatttgcatttgttggtttaa

SEQ ID NO: 192465 - DNA, 66 bp, Homo sapiens
acatctaacttcaataaagtagaagaaaaagtagttaattattatcttaccactagttcctggggg

SEQ ID NO: 192466 - DNA, 67 bp, Homo sapiens
taaagtagaagaaaaagtagttaattattatcttaccactagttcctgggggttgtaatacatctcc

SEQ ID NO: 192467 - DNA, 69 bp, Homo sapiens
aagaaaaagtagttaattattatcttaccactagttcctgggggttgtaatacatctcctgtcaggcga

SEQ ID NO: 192468 - DNA, 71 bp, Homo sapiens
agtagttaattattatcttaccactagttcctgggggttgtaatacatctcctgtcaggcgacaccaccca

SEQ ID NO: 192469 - DNA, 73 bp, Homo sapiens
tattatcttaccactagttcctgggggttgtaatacatctcctgtcaggcgacaccacccagctgggaaaata

SEQ ID NO: 192470 - DNA, 75 bp, Homo sapiens
tagttcctgggggttgtaatacatctcctgtcaggcgacaccacccagctgggaaaatatctcgagaatcatact

SEQ ID NO: 192471 - DNA, 79 bp, Homo sapiens
ggttgtaatacatctcctgtcaggcgacaccacccagctgggaaaatatctcgagaatcatacttgcaccagtaatcaa

SEQ ID NO: 192472 - DNA, 80 bp, Homo sapiens
taatacatctcctgtcaggcgacaccacccagctgggaaaatatctcgagaatcatacttgcaccagtaatcaaaagctc

SEQ ID NO: 192473 - DNA, 81 bp, Homo sapiens
tcaggcgacaccacccagctgggaaaatatctcgagaatcatacttgcaccagtaatcaaaagctccactccagccatcaa

SEQ ID NO: 192474 - DNA, 82 bp, Homo sapiens
cacccagctgggaaaatatctcgagaatcatacttgcaccagtaatcaaaagctccactccagccatcaaatgtgatatgaa

SEQ ID NO: 192475 - DNA, 81 bp, Homo sapiens
atatctcgagaatcatacttgcaccagtaatcaaaagctccactccagccatcaaatgtgatatgaacttcatccccttta

SEQ ID NO: 192476 - DNA, 80 bp, Homo sapiens
aatcatacttgcaccagtaatcaaaagctccactccagccatcaaatgtgatatgaacttcatcccctttaacatctcca

SEQ ID NO: 192477 - DNA, 79 bp, Homo sapiens
agtaatcaaaagctccactccagccatcaaatgtgatatgaacttcatcccctttaacatctccaatggtcgcaggaca

SEQ ID NO: 192478 - DNA, 81 bp, Homo sapiens
aaaagctccactccagccatcaaatgtgatatgaacttcatcccctttaacatctccaatggtcgcaggacagatgagata

SEQ ID NO: 192479 - DNA, 78 bp, Homo sapiens
cagccatcaaatgtgatatgaacttcatcccctttaacatctccaatggtcgcaggacagatgagatacgggttcttt

SEQ ID NO: 192480 - DNA, 76 bp, Homo sapiens
aatgtgatatgaacttcatcccctttaacatctccaatggtcgcaggacagatgagatacgggttctttttgtcaa

SEQ ID NO: 192481 - DNA, 75 bp, Homo sapiens
atatgaacttcatcccctttaacatctccaatggtcgcaggacagatgagatacgggttctttttgtcaatagct

SEQ ID NO: 192482 - DNA, 74 bp, Homo sapiens
ccctttaacatctccaatggtcgcaggacagatgagatacgggttctttttgtcaatagcttccagtttcatcc

SEQ ID NO: 192483 - DNA, 74 bp, Homo sapiens
atctccaatggtcgcaggacagatgagatacgggttctttttgtcaatagcttccagtttcatccccactttaa

SEQ ID NO: 192484 - DNA, 72 bp, Homo sapiens
atggtcgcaggacagatgagatacgggttctttttgtcaatagcttccagtttcatccccactttaaaatta

SEQ ID NO: 192485 - DNA, 69 bp, Homo sapiens
acagatgagatacgggttctttttgtcaatagcttccagtttcatccccactttaaaattatttagtgg

SEQ ID NO: 192486 - DNA, 65 bp, Homo sapiens
tacgggttctttttgtcaatagcttccagtttcatccccactttaaaattatttagtgggggctt

SEQ ID NO: 192487 - DNA, 67 bp, Homo sapiens
ttttgtcaatagcttccagtttcatccccactttaaaattatttagtgggggctttggtggttccta

SEQ ID NO: 192488 - DNA, 66 bp, Homo sapiens
ttccagtttcatccccactttaaaattatttagtgggggctttggtggttcctatcaaaacattaa

SEQ ID NO: 192489 - DNA, 64 bp, Homo sapiens
tttcatccccactttaaaattatttagtgggggctttggtggttcctatcaaaacattaaaaaa

SEQ ID NO: 192490 - DNA, 70 bp, Homo sapiens
gcattcccactaaaacaataaaaacatggcagctttttataacatctttcttaccttcttaaataatgtg

SEQ ID NO: 192491 - DNA, 73 bp, Homo sapiens
aaacaataaaaacatggcagctttttataacatctttcttaccttcttaaataatgtggcagatgccatttca

SEQ ID NO: 192492 - DNA, 74 bp, Homo sapiens
aacatggcagctttttataacatctttcttaccttcttaaataatgtggcagatgccatttcagacccatttag

SEQ ID NO: 192493 - DNA, 74 bp, Homo sapiens
gcagctttttataacatctttcttaccttcttaaataatgtggcagatgccatttcagacccatttagtgtctt

SEQ ID NO: 192494 - DNA, 74 bp, Homo sapiens
taacatctttcttaccttcttaaataatgtggcagatgccatttcagacccatttagtgtctttaagaggaaca

SEQ ID NO: 192495 - DNA, 74 bp, Homo sapiens
ttcttaccttcttaaataatgtggcagatgccatttcagacccatttagtgtctttaagaggaacatcggccag

SEQ ID NO: 192496 - DNA, 78 bp, Homo sapiens
ttaaataatgtggcagatgccatttcagacccatttagtgtctttaagaggaacatcggccaggaggatgtattcatc

SEQ ID NO: 192497 - DNA, 75 bp, Homo sapiens
agatgccatttcagacccatttagtgtctttaagaggaacatcggccaggaggatgtattcatctggtaccctgt

SEQ ID NO: 192498 - DNA, 73 bp, Homo sapiens
ttcagacccatttagtgtctttaagaggaacatcggccaggaggatgtattcatctggtaccctgttttataa

SEQ ID NO: 192499 - DNA, 71 bp, Homo sapiens
cccatttagtgtctttaagaggaacatcggccaggaggatgtattcatctggtaccctgttttataaaata

SEQ ID NO: 192500 - DNA, 73 bp, Homo sapiens
ttaagaggaacatcggccaggaggatgtattcatctggtaccctgttttataaaataaattaggtatcatgaa

SEQ ID NO: 192501 - DNA, 71 bp, Homo sapiens
aacatcggccaggaggatgtattcatctggtaccctgttttataaaataaattaggtatcatgaaaaagcc

SEQ ID NO: 192502 - DNA, 69 bp, Homo sapiens
tgaatatcacattagaaagaatacgctatttttaaaactttcttcttacctagtggaggttgaagtaag

SEQ ID NO: 192503 - DNA, 65 bp, Homo sapiens
agaaagaatacgctatttttaaaactttcttcttacctagtggaggttgaagtaagtctccttcc

SEQ ID NO: 192504 - DNA, 67 bp, Homo sapiens
cgctatttttaaaactttcttcttacctagtggaggttgaagtaagtctccttccttttcacatgtc

SEQ ID NO: 192505 - DNA, 67 bp, Homo sapiens
ttttaaaactttcttcttacctagtggaggttgaagtaagtctccttccttttcacatgtcccaaca

SEQ ID NO: 192506 - DNA, 71 bp, Homo sapiens
tttcttcttacctagtggaggttgaagtaagtctccttccttttcacatgtcccaacaggttgtatgtctg

SEQ ID NO: 192507 - DNA, 72 bp, Homo sapiens
ctagtggaggttgaagtaagtctccttccttttcacatgtcccaacaggttgtatgtctggggaatcgacaa

SEQ ID NO: 192508 - DNA, 70 bp, Homo sapiens
aagtaagtctccttccttttcacatgtcccaacaggttgtatgtctggggaatcgacaagcctccaaaaa

SEQ ID NO: 192509 - DNA, 74 bp, Homo sapiens
cttccttttcacatgtcccaacaggttgtatgtctggggaatcgacaagcctccaaaaatcatttctgttgtca

SEQ ID NO: 192510 - DNA, 75 bp, Homo sapiens
ttttcacatgtcccaacaggttgtatgtctggggaatcgacaagcctccaaaaatcatttctgttgtcactacca

SEQ ID NO: 192511 - DNA, 73 bp, Homo sapiens
aacaggttgtatgtctggggaatcgacaagcctccaaaaatcatttctgttgtcactaccatccagtcgtaac

SEQ ID NO: 192512 - DNA, 73 bp, Homo sapiens
ttgtatgtctggggaatcgacaagcctccaaaaatcatttctgttgtcactaccatccagtcgtaaccgtaac

SEQ ID NO: 192513 - DNA, 71 bp, Homo sapiens
aatcgacaagcctccaaaaatcatttctgttgtcactaccatccagtcgtaaccgtaacctggccccagta

SEQ ID NO: 192514 - DNA, 70 bp, Homo sapiens
ctccaaaaatcatttctgttgtcactaccatccagtcgtaaccgtaacctggccccagtaattccaataa

SEQ ID NO: 192515 - DNA, 71 bp, Homo sapiens
catttctgttgtcactaccatccagtcgtaaccgtaacctggccccagtaattccaataaccgtagcaata

SEQ ID NO: 192516 - DNA, 72 bp, Homo sapiens
ttgtcactaccatccagtcgtaaccgtaacctggccccagtaattccaataaccgtagcaatacatactgaa

SEQ ID NO: 192517 - DNA, 72 bp, Homo sapiens
taccatccagtcgtaaccgtaacctggccccagtaattccaataaccgtagcaatacatactgaagtggcat

SEQ ID NO: 192518 - DNA, 73 bp, Homo sapiens
tcgtaaccgtaacctggccccagtaattccaataaccgtagcaatacatactgaagtggcattgcgagggtca

SEQ ID NO: 192519 - DNA, 75 bp, Homo sapiens
tggccccagtaattccaataaccgtagcaatacatactgaagtggcattgcgagggtcacgggcttccaatttca

SEQ ID NO: 192520 - DNA, 74 bp, Homo sapiens
agtaattccaataaccgtagcaatacatactgaagtggcattgcgagggtcacgggcttccaatttcataccaa

SEQ ID NO: 192521 - DNA, 73 bp, Homo sapiens
aataaccgtagcaatacatactgaagtggcattgcgagggtcacgggcttccaatttcataccaactttgaaa

SEQ ID NO: 192522 - DNA, 76 bp, Homo sapiens
atacatactgaagtggcattgcgagggtcacgggcttccaatttcataccaactttgaaatcattcacaggtggaa

SEQ ID NO: 192523 - DNA, 78 bp, Homo sapiens
gtggcattgcgagggtcacgggcttccaatttcataccaactttgaaatcattcacaggtggaatctgagactatata

SEQ ID NO: 192524 - DNA, 77 bp, Homo sapiens
attgcgagggtcacgggcttccaatttcataccaactttgaaatcattcacaggtggaatctgagactatatatata

SEQ ID NO: 192525 - DNA, 74 bp, Homo sapiens
cacgggcttccaatttcataccaactttgaaatcattcacaggtggaatctgagactatatatataaataaaat

SEQ ID NO: 192526 - DNA, 73 bp, Homo sapiens
acacagacgtcctccaacaagttaatagtttacattaactaacagctacagaatcttggcatacctgacggaa

SEQ ID NO: 192527 - DNA, 75 bp, Homo sapiens
gtcctccaacaagttaatagtttacattaactaacagctacagaatcttggcatacctgacggaagcactctgaa

SEQ ID NO: 192528 - DNA, 76 bp, Homo sapiens
agttaatagtttacattaactaacagctacagaatcttggcatacctgacggaagcactctgaaggagcacttata

SEQ ID NO: 192529 - DNA, 78 bp, Homo sapiens
tttacattaactaacagctacagaatcttggcatacctgacggaagcactctgaaggagcacttatagacccagtctc

SEQ ID NO: 192530 - DNA, 78 bp, Homo sapiens
aacagctacagaatcttggcatacctgacggaagcactctgaaggagcacttatagacccagtctctttcaaatactc

SEQ ID NO: 192531 - DNA, 76 bp, Homo sapiens
aatcttggcatacctgacggaagcactctgaaggagcacttatagacccagtctctttcaaatactcctcccagtg

SEQ ID NO: 192532 - DNA, 76 bp, Homo sapiens
atacctgacggaagcactctgaaggagcacttatagacccagtctctttcaaatactcctcccagtggaaatcatc

SEQ ID NO: 192533 - DNA, 75 bp, Homo sapiens
ggaagcactctgaaggagcacttatagacccagtctctttcaaatactcctcccagtggaaatcatctggaaaaa

SEQ ID NO: 192534 - DNA, 75 bp, Homo sapiens
aaggagcacttatagacccagtctctttcaaatactcctcccagtggaaatcatctggaaaaaacacatgtgcaa

SEQ ID NO: 192535 - DNA, 73 bp, Homo sapiens
ttatagacccagtctctttcaaatactcctcccagtggaaatcatctggaaaaaacacatgtgcaaaatagtt

SEQ ID NO: 192536 - DNA, 74 bp, Homo sapiens
gtctctttcaaatactcctcccagtggaaatcatctggaaaaaacacatgtgcaaaatagtttcttaaagcata

SEQ ID NO: 192537 - DNA, 75 bp, Homo sapiens
caaatactcctcccagtggaaatcatctggaaaaaacacatgtgcaaaatagtttcttaaagcatatacaatgta

SEQ ID NO: 192538 - DNA, 64 bp, Homo sapiens
aagttaattttaacactagtgaggaagaaaactatgctgtattaaattactttaaaacctaccc

SEQ ID NO: 192539 - DNA, 68 bp, Homo sapiens
taacactagtgaggaagaaaactatgctgtattaaattactttaaaacctacccctttgtacagaaga

SEQ ID NO: 192540 - DNA, 68 bp, Homo sapiens
gaggaagaaaactatgctgtattaaattactttaaaacctacccctttgtacagaagatgtacttgac

SEQ ID NO: 192541 - DNA, 69 bp, Homo sapiens
gaaaactatgctgtattaaattactttaaaacctacccctttgtacagaagatgtacttgactgaggag

SEQ ID NO: 192542 - DNA, 68 bp, Homo sapiens
gctgtattaaattactttaaaacctacccctttgtacagaagatgtacttgactgaggagttttctct

SEQ ID NO: 192543 - DNA, 68 bp, Homo sapiens
attactttaaaacctacccctttgtacagaagatgtacttgactgaggagttttctcttgattctcct

SEQ ID NO: 192544 - DNA, 76 bp, Homo sapiens
tacccctttgtacagaagatgtacttgactgaggagttttctcttgattctccttcttgacatccatggaatctaa

SEQ ID NO: 192545 - DNA, 76 bp, Homo sapiens
tttgtacagaagatgtacttgactgaggagttttctcttgattctccttcttgacatccatggaatctaataaaaa

SEQ ID NO: 192546 - DNA, 76 bp, Homo sapiens
gatgtacttgactgaggagttttctcttgattctccttcttgacatccatggaatctaataaaaaagaaaatagca

SEQ ID NO: 192547 - DNA, 74 bp, Homo sapiens
tgaggagttttctcttgattctccttcttgacatccatggaatctaataaaaaagaaaatagcaatactgggag

SEQ ID NO: 192548 - DNA, 76 bp, Homo sapiens
tttctcttgattctccttcttgacatccatggaatctaataaaaaagaaaatagcaatactgggagtccacagcaa

SEQ ID NO: 192549 - DNA, 76 bp, Homo sapiens
attctccttcttgacatccatggaatctaataaaaaagaaaatagcaatactgggagtccacagcaacagcttgaa

SEQ ID NO: 192550 - DNA, 71 bp, Homo sapiens
agttcagtataccagaagatattcattccaaatgagtaactaaaaacattattgcctttaacaagtaaatc

SEQ ID NO: 192551 - DNA, 71 bp, Homo sapiens
taccagaagatattcattccaaatgagtaactaaaaacattattgcctttaacaagtaaatcttaccttca

SEQ ID NO: 192552 - DNA, 71 bp, Homo sapiens
tcattccaaatgagtaactaaaaacattattgcctttaacaagtaaatcttaccttcattcactgtttgtc

SEQ ID NO: 192553 - DNA, 71 bp, Homo sapiens
tgagtaactaaaaacattattgcctttaacaagtaaatcttaccttcattcactgtttgtcccatggtatc

SEQ ID NO: 192554 - DNA, 69 bp, Homo sapiens
aaaacattattgcctttaacaagtaaatcttaccttcattcactgtttgtcccatggtatccctatttg

SEQ ID NO: 192555 - DNA, 70 bp, Homo sapiens
tattgcctttaacaagtaaatcttaccttcattcactgtttgtcccatggtatccctatttggtgttgtt

SEQ ID NO: 192556 - DNA, 70 bp, Homo sapiens
ttaacaagtaaatcttaccttcattcactgtttgtcccatggtatccctatttggtgttgtttcctacaa

SEQ ID NO: 192557 - DNA, 69 bp, Homo sapiens
aatcttaccttcattcactgtttgtcccatggtatccctatttggtgttgtttcctacaaggagaaaaa

SEQ ID NO: 192558 - DNA, 69 bp, Homo sapiens
attcactgtttgtcccatggtatccctatttggtgttgtttcctacaaggagaaaaaccaattaatgcc

SEQ ID NO: 192559 - DNA, 67 bp, Homo sapiens
tttgtcccatggtatccctatttggtgttgtttcctacaaggagaaaaaccaattaatgcctccttt

SEQ ID NO: 192560 - DNA, 69 bp, Homo sapiens
ggtatccctatttggtgttgtttcctacaaggagaaaaaccaattaatgcctccttttagcatattaga

SEQ ID NO: 192561 - DNA, 70 bp, Homo sapiens
tttggtgttgtttcctacaaggagaaaaaccaattaatgcctccttttagcatattagatttctgaagga

SEQ ID NO: 192562 - DNA, 68 bp, Homo sapiens
acacctccgcctctccattccttacggggcccggaatcaccacgtacctccagtctcgtcggtgaaaa

SEQ ID NO: 192563 - DNA, 68 bp, Homo sapiens
tctccattccttacggggcccggaatcaccacgtacctccagtctcgtcggtgaaaacaacgaaattc

SEQ ID NO: 192564 - DNA, 67 bp, Homo sapiens
attccttacggggcccggaatcaccacgtacctccagtctcgtcggtgaaaacaacgaaattctgtc

SEQ ID NO: 192565 - DNA, 71 bp, Homo sapiens
ggcccggaatcaccacgtacctccagtctcgtcggtgaaaacaacgaaattctgtcccaccgatcgcgcga

SEQ ID NO: 192566 - DNA, 71 bp, Homo sapiens
acgtacctccagtctcgtcggtgaaaacaacgaaattctgtcccaccgatcgcgcgagccggcaccgagct

SEQ ID NO: 192567 - DNA, 73 bp, Homo sapiens
cctccagtctcgtcggtgaaaacaacgaaattctgtcccaccgatcgcgcgagccggcaccgagcttcacacc

SEQ ID NO: 192568 - DNA, 75 bp, Homo sapiens
gtgaaaacaacgaaattctgtcccaccgatcgcgcgagccggcaccgagcttcacaccgccgccgccatgtttga

SEQ ID NO: 192569 - DNA, 75 bp, Homo sapiens
aacaacgaaattctgtcccaccgatcgcgcgagccggcaccgagcttcacaccgccgccgccatgtttgagaagc

SEQ ID NO: 192570 - DNA, 78 bp, Homo sapiens
ttctgtcccaccgatcgcgcgagccggcaccgagcttcacaccgccgccgccatgtttgagaagccgcgcgcggagcc

SEQ ID NO: 192571 - DNA, 80 bp, Homo sapiens
atcgcgcgagccggcaccgagcttcacaccgccgccgccatgtttgagaagccgcgcgcggagccgcgcatgccccgcaa

SEQ ID NO: 192572 - DNA, 78 bp, Homo sapiens
agccggcaccgagcttcacaccgccgccgccatgtttgagaagccgcgcgcggagccgcgcatgccccgcaaccgcca

SEQ ID NO: 192573 - DNA, 78 bp, Homo sapiens
cgagcttcacaccgccgccgccatgtttgagaagccgcgcgcggagccgcgcatgccccgcaaccgccactgccgccc

SEQ ID NO: 192574 - DNA, 74 bp, Homo sapiens
accgccgccgccatgtttgagaagccgcgcgcggagccgcgcatgccccgcaaccgccactgccgccccgcccc

SEQ ID NO: 192575 - DNA, 73 bp, Homo sapiens
atgtttgagaagccgcgcgcggagccgcgcatgccccgcaaccgccactgccgccccgccccccgcgcggccg

SEQ ID NO: 192576 - DNA, 71 bp, Homo sapiens
aagccgcgcgcggagccgcgcatgccccgcaaccgccactgccgccccgccccccgcgcggccggcccgcg

SEQ ID NO: 192577 - DNA, 71 bp, Homo sapiens
gacaacaataatgctttaggaatacatgggacacaaggtacttcaattttctcctttcctcaacagtttta

SEQ ID NO: 192578 - DNA, 69 bp, Homo sapiens
atgctttaggaatacatgggacacaaggtacttcaattttctcctttcctcaacagttttattgccttt

SEQ ID NO: 192579 - DNA, 67 bp, Homo sapiens
aatacatgggacacaaggtacttcaattttctcctttcctcaacagttttattgccttttaagaaaa

SEQ ID NO: 192580 - DNA, 65 bp, Homo sapiens
acacaaggtacttcaattttctcctttcctcaacagttttattgccttttaagaaaatttttgta

SEQ ID NO: 192581 - DNA, 64 bp, Homo sapiens
cttcaattttctcctttcctcaacagttttattgccttttaagaaaatttttgtaaaatataaa

SEQ ID NO: 192582 - DNA, 67 bp, Homo sapiens
tcctttcctcaacagttttattgccttttaagaaaatttttgtaaaatataaatacaaaggcagaga

SEQ ID NO: 192583 - DNA, 66 bp, Homo sapiens
cagttttattgccttttaagaaaatttttgtaaaatataaatacaaaggcagagaatttacttaca

SEQ ID NO: 192584 - DNA, 65 bp, Homo sapiens
tgccttttaagaaaatttttgtaaaatataaatacaaaggcagagaatttacttacaaagttaaa

SEQ ID NO: 192585 - DNA, 67 bp, Homo sapiens
gaaaatttttgtaaaatataaatacaaaggcagagaatttacttacaaagttaaaacacagatttca

SEQ ID NO: 192586 - DNA, 69 bp, Homo sapiens
aaatataaatacaaaggcagagaatttacttacaaagttaaaacacagatttcaaacataaacacacga

SEQ ID NO: 192587 - DNA, 69 bp, Homo sapiens
acaaaggcagagaatttacttacaaagttaaaacacagatttcaaacataaacacacgattcagaaaat

SEQ ID NO: 192588 - DNA, 69 bp, Homo sapiens
ggcagagaatttacttacaaagttaaaacacagatttcaaacataaacacacgattcagaaaattttag

SEQ ID NO: 192589 - DNA, 69 bp, Homo sapiens
tacttacaaagttaaaacacagatttcaaacataaacacacgattcagaaaattttagttttatgtaca

SEQ ID NO: 192590 - DNA, 71 bp, Homo sapiens
aaacacagatttcaaacataaacacacgattcagaaaattttagttttatgtacatttccaagcaacctca

SEQ ID NO: 192591 - DNA, 72 bp, Homo sapiens
cagatttcaaacataaacacacgattcagaaaattttagttttatgtacatttccaagcaacctcaacatat

SEQ ID NO: 192592 - DNA, 71 bp, Homo sapiens
acataaacacacgattcagaaaattttagttttatgtacatttccaagcaacctcaacatattatgttagt

SEQ ID NO: 192593 - DNA, 70 bp, Homo sapiens
acgattcagaaaattttagttttatgtacatttccaagcaacctcaacatattatgttagttttcaatat

SEQ ID NO: 192594 - DNA, 71 bp, Homo sapiens
ttagttttatgtacatttccaagcaacctcaacatattatgttagttttcaatattttacagggtacagaa

SEQ ID NO: 192595 - DNA, 70 bp, Homo sapiens
tttatgtacatttccaagcaacctcaacatattatgttagttttcaatattttacagggtacagaaaaaa

SEQ ID NO: 192596 - DNA, 71 bp, Homo sapiens
tccaagcaacctcaacatattatgttagttttcaatattttacagggtacagaaaaaaatagctcaaagtc

SEQ ID NO: 192597 - DNA, 68 bp, Homo sapiens
acctcaacatattatgttagttttcaatattttacagggtacagaaaaaaatagctcaaagtcttctt

SEQ ID NO: 192598 - DNA, 70 bp, Homo sapiens
tatgttagttttcaatattttacagggtacagaaaaaaatagctcaaagtcttctttaaataagagcata

SEQ ID NO: 192599 - DNA, 68 bp, Homo sapiens
tttcaatattttacagggtacagaaaaaaatagctcaaagtcttctttaaataagagcataaaatgtt

SEQ ID NO: 192600 - DNA, 69 bp, Homo sapiens
cagggtacagaaaaaaatagctcaaagtcttctttaaataagagcataaaatgtttaaacatataaaca

SEQ ID NO: 192601 - DNA, 70 bp, Homo sapiens
ctttaaataagagcataaaatgtttaaacatataaacaatccggtttgatgcgtgaaaactaatttcaca

SEQ ID NO: 192602 - DNA, 70 bp, Homo sapiens
aataagagcataaaatgtttaaacatataaacaatccggtttgatgcgtgaaaactaatttcacagcttt

SEQ ID NO: 192603 - DNA, 69 bp, Homo sapiens
acaatccggtttgatgcgtgaaaactaatttcacagcttttaaattaggatataaaagtttcatacaat

SEQ ID NO: 192604 - DNA, 73 bp, Homo sapiens
tgatgcgtgaaaactaatttcacagcttttaaattaggatataaaagtttcatacaattagttgttgtgtgtg

SEQ ID NO: 192605 - DNA, 72 bp, Homo sapiens
ctaatttcacagcttttaaattaggatataaaagtttcatacaattagttgttgtgtgtggatatggtttga

SEQ ID NO: 192606 - DNA, 72 bp, Homo sapiens
cacagcttttaaattaggatataaaagtttcatacaattagttgttgtgtgtggatatggtttgaatttata

SEQ ID NO: 192607 - DNA, 74 bp, Homo sapiens
taggatataaaagtttcatacaattagttgttgtgtgtggatatggtttgaatttatattacacactactggat

SEQ ID NO: 192608 - DNA, 76 bp, Homo sapiens
caattagttgttgtgtgtggatatggtttgaatttatattacacactactggattacatccaatagcatttacctg

SEQ ID NO: 192609 - DNA, 75 bp, Homo sapiens
agttgttgtgtgtggatatggtttgaatttatattacacactactggattacatccaatagcatttacctggccc

SEQ ID NO: 192610 - DNA, 76 bp, Homo sapiens
atatggtttgaatttatattacacactactggattacatccaatagcatttacctggcccgagcaggtactctgta

SEQ ID NO: 192611 - DNA, 73 bp, Homo sapiens
aatttatattacacactactggattacatccaatagcatttacctggcccgagcaggtactctgtaaacaaaa

SEQ ID NO: 192612 - DNA, 73 bp, Homo sapiens
atattacacactactggattacatccaatagcatttacctggcccgagcaggtactctgtaaacaaaacaaag

SEQ ID NO: 192613 - DNA, 74 bp, Homo sapiens
tactggattacatccaatagcatttacctggcccgagcaggtactctgtaaacaaaacaaagttatatcaccaa

SEQ ID NO: 192614 - DNA, 73 bp, Homo sapiens
acatccaatagcatttacctggcccgagcaggtactctgtaaacaaaacaaagttatatcaccaagtgccttc

SEQ ID NO: 192615 - DNA, 68 bp, Homo sapiens
atttacctggcccgagcaggtactctgtaaacaaaacaaagttatatcaccaagtgccttccccgaat

SEQ ID NO: 192616 - DNA, 71 bp, Homo sapiens
gagcaggtactctgtaaacaaaacaaagttatatcaccaagtgccttccccgaattcgctccctcaaacca

SEQ ID NO: 192617 - DNA, 70 bp, Homo sapiens
tactctgtaaacaaaacaaagttatatcaccaagtgccttccccgaattcgctccctcaaaccaaccaca

SEQ ID NO: 192618 - DNA, 70 bp, Homo sapiens
aaaacaaagttatatcaccaagtgccttccccgaattcgctccctcaaaccaaccacacagttctgacca

SEQ ID NO: 192619 - DNA, 72 bp, Homo sapiens
aagttatatcaccaagtgccttccccgaattcgctccctcaaaccaaccacacagttctgaccactctacag

SEQ ID NO: 192620 - DNA, 79 bp, Homo sapiens
cgaattcgctccctcaaaccaaccacacagttctgaccactctacagtcatggcctgtcatcagagctttgtatgaaat

SEQ ID NO: 192621 - DNA, 79 bp, Homo sapiens
tccctcaaaccaaccacacagttctgaccactctacagtcatggcctgtcatcagagctttgtatgaaattaagtcaaa

SEQ ID NO: 192622 - DNA, 78 bp, Homo sapiens
aaaccaaccacacagttctgaccactctacagtcatggcctgtcatcagagctttgtatgaaattaagtcaaagtgtg

SEQ ID NO: 192623 - DNA, 80 bp, Homo sapiens
ttctgaccactctacagtcatggcctgtcatcagagctttgtatgaaattaagtcaaagtgtggagctccttttactcat

SEQ ID NO: 192624 - DNA, 76 bp, Homo sapiens
actctacagtcatggcctgtcatcagagctttgtatgaaattaagtcaaagtgtggagctccttttactcattttt

SEQ ID NO: 192625 - DNA, 74 bp, Homo sapiens
agtcatggcctgtcatcagagctttgtatgaaattaagtcaaagtgtggagctccttttactcatttttttttc

SEQ ID NO: 192626 - DNA, 72 bp, Homo sapiens
tgtcatcagagctttgtatgaaattaagtcaaagtgtggagctccttttactcatttttttttctccttaaa

SEQ ID NO: 192627 - DNA, 69 bp, Homo sapiens
gaaaagaaacaaatgttccaagtaaaaacaaacgtatcccaaagcatgtgtgcattgaaaagtaaagaa

SEQ ID NO: 192628 - DNA, 70 bp, Homo sapiens
gaaacaaatgttccaagtaaaaacaaacgtatcccaaagcatgtgtgcattgaaaagtaaagaaacatta

SEQ ID NO: 192629 - DNA, 71 bp, Homo sapiens
ccaagtaaaaacaaacgtatcccaaagcatgtgtgcattgaaaagtaaagaaacattataacaacttcata

SEQ ID NO: 192630 - DNA, 71 bp, Homo sapiens
aacaaacgtatcccaaagcatgtgtgcattgaaaagtaaagaaacattataacaacttcataaaaactgac

SEQ ID NO: 192631 - DNA, 69 bp, Homo sapiens
cccaaagcatgtgtgcattgaaaagtaaagaaacattataacaacttcataaaaactgacttaaaagtt

SEQ ID NO: 192632 - DNA, 68 bp, Homo sapiens
tgtgtgcattgaaaagtaaagaaacattataacaacttcataaaaactgacttaaaagtttaaaagga

SEQ ID NO: 192633 - DNA, 62 bp, Homo sapiens
gaaaagtaaagaaacattataacaacttcataaaaactgacttaaaagtttaaaaggaaaaa

SEQ ID NO: 192634 - DNA, 64 bp, Homo sapiens
cattataacaacttcataaaaactgacttaaaagtttaaaaggaaaaaaacatgtttctaagtc

SEQ ID NO: 192635 - DNA, 64 bp, Homo sapiens
acttcataaaaactgacttaaaagtttaaaaggaaaaaaacatgtttctaagtccttctgactg

SEQ ID NO: 192636 - DNA, 64 bp, Homo sapiens
aactgacttaaaagtttaaaaggaaaaaaacatgtttctaagtccttctgactggagtaatttc

SEQ ID NO: 192637 - DNA, 65 bp, Homo sapiens
cttaaaagtttaaaaggaaaaaaacatgtttctaagtccttctgactggagtaatttctcttata

SEQ ID NO: 192638 - DNA, 70 bp, Homo sapiens
aggaaaaaaacatgtttctaagtccttctgactggagtaatttctcttatataaagaagagatattttca

SEQ ID NO: 192639 - DNA, 74 bp, Homo sapiens
tctaagtccttctgactggagtaatttctcttatataaagaagagatattttcatatgtaatagtgtcctttct

SEQ ID NO: 192640 - DNA, 74 bp, Homo sapiens
ttctgactggagtaatttctcttatataaagaagagatattttcatatgtaatagtgtcctttctttacagaaa

SEQ ID NO: 192641 - DNA, 75 bp, Homo sapiens
tttctcttatataaagaagagatattttcatatgtaatagtgtcctttctttacagaaatagttgtattatgaca

SEQ ID NO: 192642 - DNA, 77 bp, Homo sapiens
ataaagaagagatattttcatatgtaatagtgtcctttctttacagaaatagttgtattatgacacatatgcacaag

SEQ ID NO: 192643 - DNA, 78 bp, Homo sapiens
gagatattttcatatgtaatagtgtcctttctttacagaaatagttgtattatgacacatatgcacaaggattaacac

SEQ ID NO: 192644 - DNA, 79 bp, Homo sapiens
tcatatgtaatagtgtcctttctttacagaaatagttgtattatgacacatatgcacaaggattaacactataacacac

SEQ ID NO: 192645 - DNA, 77 bp, Homo sapiens
agtgtcctttctttacagaaatagttgtattatgacacatatgcacaaggattaacactataacacactgtacatgg

SEQ ID NO: 192646 - DNA, 78 bp, Homo sapiens
ctttacagaaatagttgtattatgacacatatgcacaaggattaacactataacacactgtacatggtgggtccagct

SEQ ID NO: 192647 - DNA, 81 bp, Homo sapiens
aatagttgtattatgacacatatgcacaaggattaacactataacacactgtacatggtgggtccagcttgctcaccagta

SEQ ID NO: 192648 - DNA, 82 bp, Homo sapiens
attatgacacatatgcacaaggattaacactataacacactgtacatggtgggtccagcttgctcaccagtagttgtctgag

SEQ ID NO: 192649 - DNA, 82 bp, Homo sapiens
atatgcacaaggattaacactataacacactgtacatggtgggtccagcttgctcaccagtagttgtctgaggccagatcac

SEQ ID NO: 192650 - DNA, 78 bp, Homo sapiens
aggattaacactataacacactgtacatggtgggtccagcttgctcaccagtagttgtctgaggccagatcactgggg

SEQ ID NO: 192651 - DNA, 82 bp, Homo sapiens
tataacacactgtacatggtgggtccagcttgctcaccagtagttgtctgaggccagatcactggggtggagccactctaca

SEQ ID NO: 192652 - DNA, 82 bp, Homo sapiens
tgtacatggtgggtccagcttgctcaccagtagttgtctgaggccagatcactggggtggagccactctacagaggagccca

SEQ ID NO: 192653 - DNA, 83 bp, Homo sapiens
tccagcttgctcaccagtagttgtctgaggccagatcactggggtggagccactctacagaggagcccagcagagtctgaatt

SEQ ID NO: 192654 - DNA, 80 bp, Homo sapiens
tagttgtctgaggccagatcactggggtggagccactctacagaggagcccagcagagtctgaatttcgttcgtgaattc

SEQ ID NO: 192655 - DNA, 80 bp, Homo sapiens
cagatcactggggtggagccactctacagaggagcccagcagagtctgaatttcgttcgtgaattccaccagatctaaca

SEQ ID NO: 192656 - DNA, 78 bp, Homo sapiens
gggtggagccactctacagaggagcccagcagagtctgaatttcgttcgtgaattccaccagatctaacagctcctta

SEQ ID NO: 192657 - DNA, 74 bp, Homo sapiens
aggagcccagcagagtctgaatttcgttcgtgaattccaccagatctaacagctccttactttcagggttgaag

SEQ ID NO: 192658 - DNA, 72 bp, Homo sapiens
agagtctgaatttcgttcgtgaattccaccagatctaacagctccttactttcagggttgaaggcttccagg

SEQ ID NO: 192659 - DNA, 74 bp, Homo sapiens
ttcgtgaattccaccagatctaacagctccttactttcagggttgaaggcttccaggtctttggagcaagagaa

SEQ ID NO: 192660 - DNA, 75 bp, Homo sapiens
agatctaacagctccttactttcagggttgaaggcttccaggtctttggagcaagagaacaagagacttgcagaa

SEQ ID NO: 192661 - DNA, 73 bp, Homo sapiens
tttcagggttgaaggcttccaggtctttggagcaagagaacaagagacttgcagaaacctgccgataaaattc

SEQ ID NO: 192662 - DNA, 78 bp, Homo sapiens
ttgaaggcttccaggtctttggagcaagagaacaagagacttgcagaaacctgccgataaaattctgcctctgcaatg

SEQ ID NO: 192663 - DNA, 77 bp, Homo sapiens
aggtctttggagcaagagaacaagagacttgcagaaacctgccgataaaattctgcctctgcaatggtgacaatttc

SEQ ID NO: 192664 - DNA, 77 bp, Homo sapiens
gcaagagaacaagagacttgcagaaacctgccgataaaattctgcctctgcaatggtgacaatttccacgtttggaa

SEQ ID NO: 192665 - DNA, 73 bp, Homo sapiens
aacaagagacttgcagaaacctgccgataaaattctgcctctgcaatggtgacaatttccacgtttggaaaat

SEQ ID NO: 192666 - DNA, 76 bp, Homo sapiens
cttgcagaaacctgccgataaaattctgcctctgcaatggtgacaatttccacgtttggaaaattgcagcgaaata

SEQ ID NO: 192667 - DNA, 75 bp, Homo sapiens
ccgataaaattctgcctctgcaatggtgacaatttccacgtttggaaaattgcagcgaaatatgcgggaggacat

SEQ ID NO: 192668 - DNA, 75 bp, Homo sapiens
aattctgcctctgcaatggtgacaatttccacgtttggaaaattgcagcgaaatatgcgggaggacattttcaat

SEQ ID NO: 192669 - DNA, 73 bp, Homo sapiens
tttggaaaattgcagcgaaatatgcgggaggacattttcaatttcttaaggacatccgaaagcagtagccagt

SEQ ID NO: 192670 - DNA, 72 bp, Homo sapiens
aaaattgcagcgaaatatgcgggaggacattttcaatttcttaaggacatccgaaagcagtagccagtttcg

SEQ ID NO: 192671 - DNA, 70 bp, Homo sapiens
aggacattttcaatttcttaaggacatccgaaagcagtagccagtttcgtggcctacaaaacagaaagga

SEQ ID NO: 192672 - DNA, 70 bp, Homo sapiens
tttcaatttcttaaggacatccgaaagcagtagccagtttcgtggcctacaaaacagaaaggaaaatgct

SEQ ID NO: 192673 - DNA, 71 bp, Homo sapiens
ttaaggacatccgaaagcagtagccagtttcgtggcctacaaaacagaaaggaaaatgctttgagtttcca

SEQ ID NO: 192674 - DNA, 82 bp, Homo sapiens
acccacccaccctcatctgctcaaagcgcatttctaactcctgtcacctcaagagcagctcagctagttttcaatcacatga

SEQ ID NO: 192675 - DNA, 87 bp, Homo sapiens
accctcatctgctcaaagcgcatttctaactcctgtcacctcaagagcagctcagctagttttcaatcacatgacagccatgctcac

SEQ ID NO: 192676 - DNA, 87 bp, Homo sapiens
tcaaagcgcatttctaactcctgtcacctcaagagcagctcagctagttttcaatcacatgacagccatgctcacccctgagccaca

SEQ ID NO: 192677 - DNA, 84 bp, Homo sapiens
atttctaactcctgtcacctcaagagcagctcagctagttttcaatcacatgacagccatgctcacccctgagccacagatact

SEQ ID NO: 192678 - DNA, 87 bp, Homo sapiens
tgtcacctcaagagcagctcagctagttttcaatcacatgacagccatgctcacccctgagccacagatacttggatgttataacac

SEQ ID NO: 192679 - DNA, 83 bp, Homo sapiens
aagagcagctcagctagttttcaatcacatgacagccatgctcacccctgagccacagatacttggatgttataacacggtaa

SEQ ID NO: 192680 - DNA, 81 bp, Homo sapiens
agctcagctagttttcaatcacatgacagccatgctcacccctgagccacagatacttggatgttataacacggtaagagg

SEQ ID NO: 192681 - DNA, 78 bp, Homo sapiens
ttttcaatcacatgacagccatgctcacccctgagccacagatacttggatgttataacacggtaagaggggggtctc

SEQ ID NO: 192682 - DNA, 76 bp, Homo sapiens
acatgacagccatgctcacccctgagccacagatacttggatgttataacacggtaagaggggggtctctgaaaat

SEQ ID NO: 192683 - DNA, 74 bp, Homo sapiens
atgctcacccctgagccacagatacttggatgttataacacggtaagaggggggtctctgaaaattcaaattca

SEQ ID NO: 192684 - DNA, 74 bp, Homo sapiens
gccacagatacttggatgttataacacggtaagaggggggtctctgaaaattcaaattcaaacacatcgctata

SEQ ID NO: 192685 - DNA, 73 bp, Homo sapiens
atacttggatgttataacacggtaagaggggggtctctgaaaattcaaattcaaacacatcgctataggcatc

SEQ ID NO: 192686 - DNA, 77 bp, Homo sapiens
atgttataacacggtaagaggggggtctctgaaaattcaaattcaaacacatcgctataggcatcgtcatcatcatc

SEQ ID NO: 192687 - DNA, 76 bp, Homo sapiens
acggtaagaggggggtctctgaaaattcaaattcaaacacatcgctataggcatcgtcatcatcatcctggtcttc

SEQ ID NO: 192688 - DNA, 78 bp, Homo sapiens
gtctctgaaaattcaaattcaaacacatcgctataggcatcgtcatcatcatcctggtcttctggtcctggggggttg

SEQ ID NO: 192689 - DNA, 76 bp, Homo sapiens
aattcaaattcaaacacatcgctataggcatcgtcatcatcatcctggtcttctggtcctggggggttggctaaaa

SEQ ID NO: 192690 - DNA, 80 bp, Homo sapiens
attcaaacacatcgctataggcatcgtcatcatcatcctggtcttctggtcctggggggttggctaaaacatcatagcca

SEQ ID NO: 192691 - DNA, 80 bp, Homo sapiens
tataggcatcgtcatcatcatcctggtcttctggtcctggggggttggctaaaacatcatagccactttcatcatctggt

SEQ ID NO: 192692 - DNA, 79 bp, Homo sapiens
gtcatcatcatcctggtcttctggtcctggggggttggctaaaacatcatagccactttcatcatctggttctaatgga

SEQ ID NO: 192693 - DNA, 75 bp, Homo sapiens
atcatcctggtcttctggtcctggggggttggctaaaacatcatagccactttcatcatctggttctaatggagg

SEQ ID NO: 192694 - DNA, 75 bp, Homo sapiens
ttctggtcctggggggttggctaaaacatcatagccactttcatcatctggttctaatggagggcaaataagaga

SEQ ID NO: 192695 - DNA, 75 bp, Homo sapiens
ggggttggctaaaacatcatagccactttcatcatctggttctaatggagggcaaataagagaggaaggaatcag

SEQ ID NO: 192696 - DNA, 77 bp, Homo sapiens
agaaatggacttgaacttgttcacctcctacggaactagagcaaacaatgcagcttaccacaaacagagctgccata

SEQ ID NO: 192697 - DNA, 77 bp, Homo sapiens
ttgaacttgttcacctcctacggaactagagcaaacaatgcagcttaccacaaacagagctgccatagaagtcccaa

SEQ ID NO: 192698 - DNA, 78 bp, Homo sapiens
ttgttcacctcctacggaactagagcaaacaatgcagcttaccacaaacagagctgccatagaagtcccaagtgccac

SEQ ID NO: 192699 - DNA, 82 bp, Homo sapiens
ctacggaactagagcaaacaatgcagcttaccacaaacagagctgccatagaagtcccaagtgccactggcgtcatcatcat

SEQ ID NO: 192700 - DNA, 85 bp, Homo sapiens
tagagcaaacaatgcagcttaccacaaacagagctgccatagaagtcccaagtgccactggcgtcatcatcattgcgaccctgga

SEQ ID NO: 192701 - DNA, 80 bp, Homo sapiens
agcttaccacaaacagagctgccatagaagtcccaagtgccactggcgtcatcatcattgcgaccctggaggtcatttaa

SEQ ID NO: 192702 - DNA, 79 bp, Homo sapiens
accacaaacagagctgccatagaagtcccaagtgccactggcgtcatcatcattgcgaccctggaggtcatttaaataa

SEQ ID NO: 192703 - DNA, 80 bp, Homo sapiens
tgccatagaagtcccaagtgccactggcgtcatcatcattgcgaccctggaggtcatttaaataatctggagggagagaa

SEQ ID NO: 192704 - DNA, 76 bp, Homo sapiens
agaagtcccaagtgccactggcgtcatcatcattgcgaccctggaggtcatttaaataatctggagggagagaaaa

SEQ ID NO: 192705 - DNA, 74 bp, Homo sapiens
agtgccactggcgtcatcatcattgcgaccctggaggtcatttaaataatctggagggagagaaaaataaaaaa

SEQ ID NO: 192706 - DNA, 71 bp, Homo sapiens
cgagttatcatctaatttttgaataagaccatttcttgaactttgtcatacctgttaagaacttttccata

SEQ ID NO: 192707 - DNA, 69 bp, Homo sapiens
tttttgaataagaccatttcttgaactttgtcatacctgttaagaacttttccataagttcactgtggg

SEQ ID NO: 192708 - DNA, 72 bp, Homo sapiens
aagaccatttcttgaactttgtcatacctgttaagaacttttccataagttcactgtgggtcattttcatga

SEQ ID NO: 192709 - DNA, 73 bp, Homo sapiens
ttcttgaactttgtcatacctgttaagaacttttccataagttcactgtgggtcattttcatgatggttctac

SEQ ID NO: 192710 - DNA, 74 bp, Homo sapiens
ttgtcatacctgttaagaacttttccataagttcactgtgggtcattttcatgatggttctacctgagtacgta

SEQ ID NO: 192711 - DNA, 73 bp, Homo sapiens
tgttaagaacttttccataagttcactgtgggtcattttcatgatggttctacctgagtacgtagccaaggtg

SEQ ID NO: 192712 - DNA, 74 bp, Homo sapiens
acttttccataagttcactgtgggtcattttcatgatggttctacctgagtacgtagccaaggtggggtcagca

SEQ ID NO: 192713 - DNA, 77 bp, Homo sapiens
ttcactgtgggtcattttcatgatggttctacctgagtacgtagccaaggtggggtcagcaccataagagagaagta

SEQ ID NO: 192714 - DNA, 75 bp, Homo sapiens
cattttcatgatggttctacctgagtacgtagccaaggtggggtcagcaccataagagagaagtagtcggacaat

SEQ ID NO: 192715 - DNA, 74 bp, Homo sapiens
atgatggttctacctgagtacgtagccaaggtggggtcagcaccataagagagaagtagtcggacaatttccaa

SEQ ID NO: 192716 - DNA, 75 bp, Homo sapiens
ctgagtacgtagccaaggtggggtcagcaccataagagagaagtagtcggacaatttccaagtgatcgttctcaa

SEQ ID NO: 192717 - DNA, 77 bp, Homo sapiens
tacgtagccaaggtggggtcagcaccataagagagaagtagtcggacaatttccaagtgatcgttctcaacagcatc

SEQ ID NO: 192718 - DNA, 79 bp, Homo sapiens
gggtcagcaccataagagagaagtagtcggacaatttccaagtgatcgttctcaacagcatcgtgcagaggcctaggaa

SEQ ID NO: 192719 - DNA, 79 bp, Homo sapiens
agcaccataagagagaagtagtcggacaatttccaagtgatcgttctcaacagcatcgtgcagaggcctaggaagagag

SEQ ID NO: 192720 - DNA, 78 bp, Homo sapiens
aagtagtcggacaatttccaagtgatcgttctcaacagcatcgtgcagaggcctaggaagagaggcgcaatagaatta

SEQ ID NO: 192721 - DNA, 84 bp, Homo sapiens
gggaagcttggtctcagcagagccaggctgagaacaagacacatcactgacctggttccatcctgggcactacagttgacatca

SEQ ID NO: 192722 - DNA, 85 bp, Homo sapiens
agcagagccaggctgagaacaagacacatcactgacctggttccatcctgggcactacagttgacatcagcgccatattcaagga

SEQ ID NO: 192723 - DNA, 82 bp, Homo sapiens
aggctgagaacaagacacatcactgacctggttccatcctgggcactacagttgacatcagcgccatattcaaggaggtgtc

SEQ ID NO: 192724 - DNA, 83 bp, Homo sapiens
aagacacatcactgacctggttccatcctgggcactacagttgacatcagcgccatattcaaggaggtgtcgcacaatgttga

SEQ ID NO: 192725 - DNA, 84 bp, Homo sapiens
acatcactgacctggttccatcctgggcactacagttgacatcagcgccatattcaaggaggtgtcgcacaatgttgagccagc

SEQ ID NO: 192726 - DNA, 83 bp, Homo sapiens
ttccatcctgggcactacagttgacatcagcgccatattcaaggaggtgtcgcacaatgttgagccagcccctagcacaagct

SEQ ID NO: 192727 - DNA, 85 bp, Homo sapiens
ctgggcactacagttgacatcagcgccatattcaaggaggtgtcgcacaatgttgagccagcccctagcacaagcttcatgcagg

SEQ ID NO: 192728 - DNA, 86 bp, Homo sapiens
tacagttgacatcagcgccatattcaaggaggtgtcgcacaatgttgagccagcccctagcacaagcttcatgcagggcgcagtaa

SEQ ID NO: 192729 - DNA, 83 bp, Homo sapiens
atcagcgccatattcaaggaggtgtcgcacaatgttgagccagcccctagcacaagcttcatgcagggcgcagtaacctgcgt

SEQ ID NO: 192730 - DNA, 81 bp, Homo sapiens
tattcaaggaggtgtcgcacaatgttgagccagcccctagcacaagcttcatgcagggcgcagtaacctgcgttgtcccga

SEQ ID NO: 192731 - DNA, 83 bp, Homo sapiens
tcgcacaatgttgagccagcccctagcacaagcttcatgcagggcgcagtaacctgcgttgtcccgatgatttacatcacaaa

SEQ ID NO: 192732 - DNA, 80 bp, Homo sapiens
aatgttgagccagcccctagcacaagcttcatgcagggcgcagtaacctgcgttgtcccgatgatttacatcacaaatct

SEQ ID NO: 192733 - DNA, 81 bp, Homo sapiens
cctagcacaagcttcatgcagggcgcagtaacctgcgttgtcccgatgatttacatcacaaatcttgttctctaagcagta

SEQ ID NO: 192734 - DNA, 80 bp, Homo sapiens
acaagcttcatgcagggcgcagtaacctgcgttgtcccgatgatttacatcacaaatcttgttctctaagcagtacagga

SEQ ID NO: 192735 - DNA, 78 bp, Homo sapiens
atgcagggcgcagtaacctgcgttgtcccgatgatttacatcacaaatcttgttctctaagcagtacaggaccacttc

SEQ ID NO: 192736 - DNA, 74 bp, Homo sapiens
agtaacctgcgttgtcccgatgatttacatcacaaatcttgttctctaagcagtacaggaccacttcctgtggg

SEQ ID NO: 192737 - DNA, 73 bp, Homo sapiens
cgttgtcccgatgatttacatcacaaatcttgttctctaagcagtacaggaccacttcctgtggggaggggag

SEQ ID NO: 192738 - DNA, 75 bp, Homo sapiens
atgatttacatcacaaatcttgttctctaagcagtacaggaccacttcctgtggggaggggagggaagaatgcca

SEQ ID NO: 192739 - DNA, 78 bp, Homo sapiens
cccgccccccagcctgcagccccagggagcgcccacagggacacacctcatagccaagcctggctgcccgctgcagaa

SEQ ID NO: 192740 - DNA, 78 bp, Homo sapiens
cccagggagcgcccacagggacacacctcatagccaagcctggctgcccgctgcagaagggtctcgccagcgttctta

SEQ ID NO: 192741 - DNA, 79 bp, Homo sapiens
gcccacagggacacacctcatagccaagcctggctgcccgctgcagaagggtctcgccagcgttcttattgacaataag

SEQ ID NO: 192742 - DNA, 79 bp, Homo sapiens
acacacctcatagccaagcctggctgcccgctgcagaagggtctcgccagcgttcttattgacaataagtctccgtgct

SEQ ID NO: 192743 - DNA, 78 bp, Homo sapiens
cctcatagccaagcctggctgcccgctgcagaagggtctcgccagcgttcttattgacaataagtctccgtgcttccg

SEQ ID NO: 192744 - DNA, 77 bp, Homo sapiens
aagcctggctgcccgctgcagaagggtctcgccagcgttcttattgacaataagtctccgtgcttccggcggcatag

SEQ ID NO: 192745 - DNA, 76 bp, Homo sapiens
ctgcagaagggtctcgccagcgttcttattgacaataagtctccgtgcttccggcggcatagggcgagactgggtg

SEQ ID NO: 192746 - DNA, 73 bp, Homo sapiens
aagggtctcgccagcgttcttattgacaataagtctccgtgcttccggcggcatagggcgagactgggtggtc

SEQ ID NO: 192747 - DNA, 73 bp, Homo sapiens
agcgttcttattgacaataagtctccgtgcttccggcggcatagggcgagactgggtggtctcctgaggggaa

SEQ ID NO: 192748 - DNA, 76 bp, Homo sapiens
ttattgacaataagtctccgtgcttccggcggcatagggcgagactgggtggtctcctgaggggaacttgagcatg

SEQ ID NO: 192749 - DNA, 79 bp, Homo sapiens
taagtctccgtgcttccggcggcatagggcgagactgggtggtctcctgaggggaacttgagcatggcagctgtgtgga

SEQ ID NO: 192750 - DNA, 80 bp, Homo sapiens
tgcttccggcggcatagggcgagactgggtggtctcctgaggggaacttgagcatggcagctgtgtggactgggaggctg

SEQ ID NO: 192751 - DNA, 82 bp, Homo sapiens
atagggcgagactgggtggtctcctgaggggaacttgagcatggcagctgtgtggactgggaggctggtagcagttgctgca

SEQ ID NO: 192752 - DNA, 81 bp, Homo sapiens
tgggtggtctcctgaggggaacttgagcatggcagctgtgtggactgggaggctggtagcagttgctgcaagcggtcgaag

SEQ ID NO: 192753 - DNA, 81 bp, Homo sapiens
tctcctgaggggaacttgagcatggcagctgtgtggactgggaggctggtagcagttgctgcaagcggtcgaagggctttg

SEQ ID NO: 192754 - DNA, 82 bp, Homo sapiens
ggaacttgagcatggcagctgtgtggactgggaggctggtagcagttgctgcaagcggtcgaagggctttggctcctgcttg

SEQ ID NO: 192755 - DNA, 85 bp, Homo sapiens
tggcagctgtgtggactgggaggctggtagcagttgctgcaagcggtcgaagggctttggctcctgcttggctggtgacagatca

SEQ ID NO: 192756 - DNA, 80 bp, Homo sapiens
aggctggtagcagttgctgcaagcggtcgaagggctttggctcctgcttggctggtgacagatcatagtccgaactgggc

SEQ ID NO: 192757 - DNA, 80 bp, Homo sapiens
gtagcagttgctgcaagcggtcgaagggctttggctcctgcttggctggtgacagatcatagtccgaactgggctccggc

SEQ ID NO: 192758 - DNA, 76 bp, Homo sapiens
aagcggtcgaagggctttggctcctgcttggctggtgacagatcatagtccgaactgggctccggccgctttctga

SEQ ID NO: 192759 - DNA, 76 bp, Homo sapiens
aagggctttggctcctgcttggctggtgacagatcatagtccgaactgggctccggccgctttctgaatctccgga

SEQ ID NO: 192760 - DNA, 80 bp, Homo sapiens
tcctgcttggctggtgacagatcatagtccgaactgggctccggccgctttctgaatctccggacagtcacctatcataa

SEQ ID NO: 192761 - DNA, 76 bp, Homo sapiens
ctggtgacagatcatagtccgaactgggctccggccgctttctgaatctccggacagtcacctatcataaaaccaa

SEQ ID NO: 192762 - DNA, 78 bp, Homo sapiens
acagatcatagtccgaactgggctccggccgctttctgaatctccggacagtcacctatcataaaaccaagcagcgca

SEQ ID NO: 192763 - DNA, 74 bp, Homo sapiens
cgaactgggctccggccgctttctgaatctccggacagtcacctatcataaaaccaagcagcgcacacggttaa

SEQ ID NO: 192764 - DNA, 74 bp, Homo sapiens
gatgtgttcgcacaggccccagagggaagccggggtcaagaggtaccttgccatcggcattctccacgtagtat

SEQ ID NO: 192765 - DNA, 72 bp, Homo sapiens
gttcgcacaggccccagagggaagccggggtcaagaggtaccttgccatcggcattctccacgtagtattcc

SEQ ID NO: 192766 - DNA, 72 bp, Homo sapiens
aagccggggtcaagaggtaccttgccatcggcattctccacgtagtattcccctgtcagtggcaatccccgc

SEQ ID NO: 192767 - DNA, 74 bp, Homo sapiens
aagaggtaccttgccatcggcattctccacgtagtattcccctgtcagtggcaatccccgcctggactcctgag

SEQ ID NO: 192768 - DNA, 76 bp, Homo sapiens
ttgccatcggcattctccacgtagtattcccctgtcagtggcaatccccgcctggactcctgagggatcaagtgtt

SEQ ID NO: 192769 - DNA, 71 bp, Homo sapiens
attctccacgtagtattcccctgtcagtggcaatccccgcctggactcctgagggatcaagtgtttggttt

SEQ ID NO: 192770 - DNA, 75 bp, Homo sapiens
tagtattcccctgtcagtggcaatccccgcctggactcctgagggatcaagtgtttggttttgcacagtctcttc

SEQ ID NO: 192771 - DNA, 76 bp, Homo sapiens
tgtcagtggcaatccccgcctggactcctgagggatcaagtgtttggttttgcacagtctcttcccggatggcttc

SEQ ID NO: 192772 - DNA, 73 bp, Homo sapiens
aatccccgcctggactcctgagggatcaagtgtttggttttgcacagtctcttcccggatggcttctcgctgt

SEQ ID NO: 192773 - DNA, 75 bp, Homo sapiens
tggactcctgagggatcaagtgtttggttttgcacagtctcttcccggatggcttctcgctgttgtcggtgtatt

SEQ ID NO: 192774 - DNA, 78 bp, Homo sapiens
cctgagggatcaagtgtttggttttgcacagtctcttcccggatggcttctcgctgttgtcggtgtatttctgcagca

SEQ ID NO: 192775 - DNA, 77 bp, Homo sapiens
aagtgtttggttttgcacagtctcttcccggatggcttctcgctgttgtcggtgtatttctgcagcagggaggcagc

SEQ ID NO: 192776 - DNA, 80 bp, Homo sapiens
ttttgcacagtctcttcccggatggcttctcgctgttgtcggtgtatttctgcagcagggaggcagcctggcaatcctct

SEQ ID NO: 192777 - DNA, 82 bp, Homo sapiens
tctcttcccggatggcttctcgctgttgtcggtgtatttctgcagcagggaggcagcctggcaatcctcttcttcgtctgca

SEQ ID NO: 192778 - DNA, 86 bp, Homo sapiens
atggcttctcgctgttgtcggtgtatttctgcagcagggaggcagcctggcaatcctcttcttcgtctgcacacagcacatctgtc

SEQ ID NO: 192779 - DNA, 83 bp, Homo sapiens
tgttgtcggtgtatttctgcagcagggaggcagcctggcaatcctcttcttcgtctgcacacagcacatctgtcttctggttt

SEQ ID NO: 192780 - DNA, 81 bp, Homo sapiens
tatttctgcagcagggaggcagcctggcaatcctcttcttcgtctgcacacagcacatctgtcttctggttttctttaatt

SEQ ID NO: 192781 - DNA, 80 bp, Homo sapiens
agcagggaggcagcctggcaatcctcttcttcgtctgcacacagcacatctgtcttctggttttctttaattttctgctg

SEQ ID NO: 192782 - DNA, 80 bp, Homo sapiens
aggcagcctggcaatcctcttcttcgtctgcacacagcacatctgtcttctggttttctttaattttctgctgtttggca

SEQ ID NO: 192783 - DNA, 77 bp, Homo sapiens
aatcctcttcttcgtctgcacacagcacatctgtcttctggttttctttaattttctgctgtttggcaggcggcctg

SEQ ID NO: 192784 - DNA, 78 bp, Homo sapiens
ttcttcgtctgcacacagcacatctgtcttctggttttctttaattttctgctgtttggcaggcggcctggaggctgg

SEQ ID NO: 192785 - DNA, 80 bp, Homo sapiens
acagcacatctgtcttctggttttctttaattttctgctgtttggcaggcggcctggaggctggtgcgcagcttggctga

SEQ ID NO: 192786 - DNA, 78 bp, Homo sapiens
tgtcttctggttttctttaattttctgctgtttggcaggcggcctggaggctggtgcgcagcttggctgagcctgctt

SEQ ID NO: 192787 - DNA, 80 bp, Homo sapiens
tttctttaattttctgctgtttggcaggcggcctggaggctggtgcgcagcttggctgagcctgctttttgccgcctgca

SEQ ID NO: 192788 - DNA, 83 bp, Homo sapiens
tttctgctgtttggcaggcggcctggaggctggtgcgcagcttggctgagcctgctttttgccgcctgcactggtggatgaaa

SEQ ID NO: 192789 - DNA, 83 bp, Homo sapiens
tttggcaggcggcctggaggctggtgcgcagcttggctgagcctgctttttgccgcctgcactggtggatgaaagactcttca

SEQ ID NO: 192790 - DNA, 84 bp, Homo sapiens
gcctggaggctggtgcgcagcttggctgagcctgctttttgccgcctgcactggtggatgaaagactcttcatgggcggagagc

SEQ ID NO: 192791 - DNA, 83 bp, Homo sapiens
tggtgcgcagcttggctgagcctgctttttgccgcctgcactggtggatgaaagactcttcatgggcggagagccggagaaca

SEQ ID NO: 192792 - DNA, 80 bp, Homo sapiens
cttggctgagcctgctttttgccgcctgcactggtggatgaaagactcttcatgggcggagagccggagaacacaggcaa

SEQ ID NO: 192793 - DNA, 76 bp, Homo sapiens
tttttgccgcctgcactggtggatgaaagactcttcatgggcggagagccggagaacacaggcaagcctaaatacg

SEQ ID NO: 192794 - DNA, 73 bp, Homo sapiens
actggtggatgaaagactcttcatgggcggagagccggagaacacaggcaagcctaaatacggagggggtgac

SEQ ID NO: 192795 - DNA, 70 bp, Homo sapiens
ctcttcatgggcggagagccggagaacacaggcaagcctaaatacggagggggtgacggggtggcgggcg

SEQ ID NO: 192796 - DNA, 69 bp, Homo sapiens
accctccaggagcggggtgaacactcaaggggtggcccccgcataccttgttcattgtcactgggttta

SEQ ID NO: 192797 - DNA, 70 bp, Homo sapiens
agcggggtgaacactcaaggggtggcccccgcataccttgttcattgtcactgggtttaagagactcttc

SEQ ID NO: 192798 - DNA, 70 bp, Homo sapiens
aacactcaaggggtggcccccgcataccttgttcattgtcactgggtttaagagactcttccgaccagct

SEQ ID NO: 192799 - DNA, 71 bp, Homo sapiens
gggtggcccccgcataccttgttcattgtcactgggtttaagagactcttccgaccagcttctgttgcctt

SEQ ID NO: 192800 - DNA, 74 bp, Homo sapiens
gcataccttgttcattgtcactgggtttaagagactcttccgaccagcttctgttgcctttggcctctgccctt

SEQ ID NO: 192801 - DNA, 72 bp, Homo sapiens
ccttgttcattgtcactgggtttaagagactcttccgaccagcttctgttgcctttggcctctgcccttttc

SEQ ID NO: 192802 - DNA, 70 bp, Homo sapiens
actgggtttaagagactcttccgaccagcttctgttgcctttggcctctgcccttttcctgccaggtttc

SEQ ID NO: 192803 - DNA, 74 bp, Homo sapiens
tttaagagactcttccgaccagcttctgttgcctttggcctctgcccttttcctgccaggtttctcttcagtga

SEQ ID NO: 192804 - DNA, 74 bp, Homo sapiens
tcttccgaccagcttctgttgcctttggcctctgcccttttcctgccaggtttctcttcagtgatgttagtccc

SEQ ID NO: 192805 - DNA, 74 bp, Homo sapiens
agcttctgttgcctttggcctctgcccttttcctgccaggtttctcttcagtgatgttagtcccctgaggaatg

SEQ ID NO: 192806 - DNA, 76 bp, Homo sapiens
tttggcctctgcccttttcctgccaggtttctcttcagtgatgttagtcccctgaggaatggcctcaggctgagtg

SEQ ID NO: 192807 - DNA, 75 bp, Homo sapiens
ccttttcctgccaggtttctcttcagtgatgttagtcccctgaggaatggcctcaggctgagtggcctgggtcac

SEQ ID NO: 192808 - DNA, 77 bp, Homo sapiens
tcctgccaggtttctcttcagtgatgttagtcccctgaggaatggcctcaggctgagtggcctgggtcacttccttc

SEQ ID NO: 192809 - DNA, 77 bp, Homo sapiens
tttctcttcagtgatgttagtcccctgaggaatggcctcaggctgagtggcctgggtcacttccttcctgctttgcc

SEQ ID NO: 192810 - DNA, 73 bp, Homo sapiens
atgttagtcccctgaggaatggcctcaggctgagtggcctgggtcacttccttcctgctttgccggccaggtt

SEQ ID NO: 192811 - DNA, 78 bp, Homo sapiens
agtggcctgggtcacttccttcctgctttgccggccaggtttgccatctgctgccgacacctgctgctcccatcgttc

SEQ ID NO: 192812 - DNA, 82 bp, Homo sapiens
gtcacttccttcctgctttgccggccaggtttgccatctgctgccgacacctgctgctcccatcgttctctaaggtgcagca

SEQ ID NO: 192813 - DNA, 81 bp, Homo sapiens
ttcctgctttgccggccaggtttgccatctgctgccgacacctgctgctcccatcgttctctaaggtgcagcaagtggcgt

SEQ ID NO: 192814 - DNA, 77 bp, Homo sapiens
ccggccaggtttgccatctgctgccgacacctgctgctcccatcgttctctaaggtgcagcaagtggcgttgttttt

SEQ ID NO: 192815 - DNA, 78 bp, Homo sapiens
aggtttgccatctgctgccgacacctgctgctcccatcgttctctaaggtgcagcaagtggcgttgttttttaggatg

SEQ ID NO: 192816 - DNA, 76 bp, Homo sapiens
ctgccgacacctgctgctcccatcgttctctaaggtgcagcaagtggcgttgttttttaggatggagccctgttaa

SEQ ID NO: 192817 - DNA, 77 bp, Homo sapiens
acctgctgctcccatcgttctctaaggtgcagcaagtggcgttgttttttaggatggagccctgttaattcaatgca

SEQ ID NO: 192818 - DNA, 76 bp, Homo sapiens
tcccatcgttctctaaggtgcagcaagtggcgttgttttttaggatggagccctgttaattcaatgcacaccttca

SEQ ID NO: 192819 - DNA, 74 bp, Homo sapiens
ttctctaaggtgcagcaagtggcgttgttttttaggatggagccctgttaattcaatgcacaccttcaggttgg

SEQ ID NO: 192820 - DNA, 75 bp, Homo sapiens
agcaagtggcgttgttttttaggatggagccctgttaattcaatgcacaccttcaggttggtcagctcactataa

SEQ ID NO: 192821 - DNA, 74 bp, Homo sapiens
cgttgttttttaggatggagccctgttaattcaatgcacaccttcaggttggtcagctcactataatgtgggtc

SEQ ID NO: 192822 - DNA, 77 bp, Homo sapiens
taggatggagccctgttaattcaatgcacaccttcaggttggtcagctcactataatgtgggtcttctaagtggtta

SEQ ID NO: 192823 - DNA, 76 bp, Homo sapiens
attcaatgcacaccttcaggttggtcagctcactataatgtgggtcttctaagtggttagaggaactgtttgtcat

SEQ ID NO: 192824 - DNA, 72 bp, Homo sapiens
accttcaggttggtcagctcactataatgtgggtcttctaagtggttagaggaactgtttgtcatttccctc

SEQ ID NO: 192825 - DNA, 78 bp, Homo sapiens
tcagctcactataatgtgggtcttctaagtggttagaggaactgtttgtcatttccctctcaggccagtcatctaatg

SEQ ID NO: 192826 - DNA, 75 bp, Homo sapiens
tataatgtgggtcttctaagtggttagaggaactgtttgtcatttccctctcaggccagtcatctaatggagaaa

SEQ ID NO: 192827 - DNA, 74 bp, Homo sapiens
tcttctaagtggttagaggaactgtttgtcatttccctctcaggccagtcatctaatggagaaataactacaaa

SEQ ID NO: 192828 - DNA, 73 bp, Homo sapiens
gttagaggaactgtttgtcatttccctctcaggccagtcatctaatggagaaataactacaaattaatcaaaa

SEQ ID NO: 192829 - DNA, 72 bp, Homo sapiens
aggaactgtttgtcatttccctctcaggccagtcatctaatggagaaataactacaaattaatcaaaaagcc

SEQ ID NO: 192830 - DNA, 71 bp, Homo sapiens
atgcaaaggcccaccccccggcaggcgggcgaagcagacagggctcacctttagagactcgtcggcgtttg

SEQ ID NO: 192831 - DNA, 72 bp, Homo sapiens
accccccggcaggcgggcgaagcagacagggctcacctttagagactcgtcggcgtttggctttcagcagag

SEQ ID NO: 192832 - DNA, 75 bp, Homo sapiens
aggcgggcgaagcagacagggctcacctttagagactcgtcggcgtttggctttcagcagagggtcctctggcac

SEQ ID NO: 192833 - DNA, 76 bp, Homo sapiens
aagcagacagggctcacctttagagactcgtcggcgtttggctttcagcagagggtcctctggcacctcctccgca

SEQ ID NO: 192834 - DNA, 77 bp, Homo sapiens
gctcacctttagagactcgtcggcgtttggctttcagcagagggtcctctggcacctcctccgcagtggtctcagtg

SEQ ID NO: 192835 - DNA, 76 bp, Homo sapiens
cctttagagactcgtcggcgtttggctttcagcagagggtcctctggcacctcctccgcagtggtctcagtgtggc

SEQ ID NO: 192836 - DNA, 80 bp, Homo sapiens
tcggcgtttggctttcagcagagggtcctctggcacctcctccgcagtggtctcagtgtggctgctgtcacctgagactt

SEQ ID NO: 192837 - DNA, 80 bp, Homo sapiens
tttggctttcagcagagggtcctctggcacctcctccgcagtggtctcagtgtggctgctgtcacctgagactttgcgtt

SEQ ID NO: 192838 - DNA, 78 bp, Homo sapiens
agagggtcctctggcacctcctccgcagtggtctcagtgtggctgctgtcacctgagactttgcgtttcctgtccacc

SEQ ID NO: 192839 - DNA, 78 bp, Homo sapiens
tcctccgcagtggtctcagtgtggctgctgtcacctgagactttgcgtttcctgtccacccggagggtggggctgtga

SEQ ID NO: 192840 - DNA, 79 bp, Homo sapiens
tggtctcagtgtggctgctgtcacctgagactttgcgtttcctgtccacccggagggtggggctgtgaggcatgtccga

SEQ ID NO: 192841 - DNA, 75 bp, Homo sapiens
ctgctgtcacctgagactttgcgtttcctgtccacccggagggtggggctgtgaggcatgtccgaggccacctgg

SEQ ID NO: 192842 - DNA, 73 bp, Homo sapiens
acctgagactttgcgtttcctgtccacccggagggtggggctgtgaggcatgtccgaggccacctggtctgcg

SEQ ID NO: 192843 - DNA, 72 bp, Homo sapiens
actttgcgtttcctgtccacccggagggtggggctgtgaggcatgtccgaggccacctggtctgcgggaggc

SEQ ID NO: 192844 - DNA, 78 bp, Homo sapiens
tcctgtccacccggagggtggggctgtgaggcatgtccgaggccacctggtctgcgggaggctcgctcacaggctgcc

SEQ ID NO: 192845 - DNA, 78 bp, Homo sapiens
gggtggggctgtgaggcatgtccgaggccacctggtctgcgggaggctcgctcacaggctgcctctccacaaagtact

SEQ ID NO: 192846 - DNA, 81 bp, Homo sapiens
tgtgaggcatgtccgaggccacctggtctgcgggaggctcgctcacaggctgcctctccacaaagtacttctccacaggaa

SEQ ID NO: 192847 - DNA, 78 bp, Homo sapiens
atgtccgaggccacctggtctgcgggaggctcgctcacaggctgcctctccacaaagtacttctccacaggaagatct

SEQ ID NO: 192848 - DNA, 77 bp, Homo sapiens
acctggtctgcgggaggctcgctcacaggctgcctctccacaaagtacttctccacaggaagatctttgtcctctgg

SEQ ID NO: 192849 - DNA, 76 bp, Homo sapiens
cgggaggctcgctcacaggctgcctctccacaaagtacttctccacaggaagatctttgtcctctggggcttcaaa

SEQ ID NO: 192850 - DNA, 75 bp, Homo sapiens
ctcacaggctgcctctccacaaagtacttctccacaggaagatctttgtcctctggggcttcaaagggatcacgg

SEQ ID NO: 192851 - DNA, 74 bp, Homo sapiens
tgcctctccacaaagtacttctccacaggaagatctttgtcctctggggcttcaaagggatcacggtgcttgtt

SEQ ID NO: 192852 - DNA, 72 bp, Homo sapiens
acaaagtacttctccacaggaagatctttgtcctctggggcttcaaagggatcacggtgcttgtttccaaca

SEQ ID NO: 192853 - DNA, 73 bp, Homo sapiens
acttctccacaggaagatctttgtcctctggggcttcaaagggatcacggtgcttgtttccaacactatactc

SEQ ID NO: 192854 - DNA, 71 bp, Homo sapiens
aggaagatctttgtcctctggggcttcaaagggatcacggtgcttgtttccaacactatactcgcctgggg

SEQ ID NO: 192855 - DNA, 73 bp, Homo sapiens
ttcaaagggatcacggtgcttgtttccaacactatactcgcctgggggaggggagacaagagggcattaatga

SEQ ID NO: 192856 - DNA, 75 bp, Homo sapiens
aaccggacctgaggccaacacaagcaaactgctcaggtttacttacatctctcactttcgttctgttctgcaatg

SEQ ID NO: 192857 - DNA, 77 bp, Homo sapiens
acctgaggccaacacaagcaaactgctcaggtttacttacatctctcactttcgttctgttctgcaatggcctcctc

SEQ ID NO: 192858 - DNA, 76 bp, Homo sapiens
aacacaagcaaactgctcaggtttacttacatctctcactttcgttctgttctgcaatggcctcctccagggtgac

SEQ ID NO: 192859 - DNA, 73 bp, Homo sapiens
aaactgctcaggtttacttacatctctcactttcgttctgttctgcaatggcctcctccagggtgaccgactt

SEQ ID NO: 192860 - DNA, 72 bp, Homo sapiens
gtttacttacatctctcactttcgttctgttctgcaatggcctcctccagggtgaccgactttggctttttg

SEQ ID NO: 192861 - DNA, 72 bp, Homo sapiens
tctcactttcgttctgttctgcaatggcctcctccagggtgaccgactttggctttttgtcctgatttcctt

SEQ ID NO: 192862 - DNA, 71 bp, Homo sapiens
tttcgttctgttctgcaatggcctcctccagggtgaccgactttggctttttgtcctgatttcctttcaac

SEQ ID NO: 192863 - DNA, 70 bp, Homo sapiens
ttctgcaatggcctcctccagggtgaccgactttggctttttgtcctgatttcctttcaacctttcccag

SEQ ID NO: 192864 - DNA, 69 bp, Homo sapiens
ctccagggtgaccgactttggctttttgtcctgatttcctttcaacctttcccagtcggctgggctgaa

SEQ ID NO: 192865 - DNA, 71 bp, Homo sapiens
accgactttggctttttgtcctgatttcctttcaacctttcccagtcggctgggctgaatttgcacatctc

SEQ ID NO: 192866 - DNA, 73 bp, Homo sapiens
tggctttttgtcctgatttcctttcaacctttcccagtcggctgggctgaatttgcacatctcggagtctttg

SEQ ID NO: 192867 - DNA, 73 bp, Homo sapiens
cctgatttcctttcaacctttcccagtcggctgggctgaatttgcacatctcggagtctttggttgctgggtg

SEQ ID NO: 192868 - DNA, 74 bp, Homo sapiens
tttcaacctttcccagtcggctgggctgaatttgcacatctcggagtctttggttgctgggtggccaccttctc

SEQ ID NO: 192869 - DNA, 73 bp, Homo sapiens
ctttcccagtcggctgggctgaatttgcacatctcggagtctttggttgctgggtggccaccttctctttctt

SEQ ID NO: 192870 - DNA, 78 bp, Homo sapiens
tgggctgaatttgcacatctcggagtctttggttgctgggtggccaccttctctttctttcatctccaactctgagaa

SEQ ID NO: 192871 - DNA, 79 bp, Homo sapiens
aatttgcacatctcggagtctttggttgctgggtggccaccttctctttctttcatctccaactctgagaagcgcatca

SEQ ID NO: 192872 - DNA, 80 bp, Homo sapiens
tcggagtctttggttgctgggtggccaccttctctttctttcatctccaactctgagaagcgcatcattgcacgctagaa

SEQ ID NO: 192873 - DNA, 80 bp, Homo sapiens
tctttggttgctgggtggccaccttctctttctttcatctccaactctgagaagcgcatcattgcacgctagaaagagaa

SEQ ID NO: 192874 - DNA, 79 bp, Homo sapiens
tggccaccttctctttctttcatctccaactctgagaagcgcatcattgcacgctagaaagagaacggagatggaaaaa

SEQ ID NO: 192875 - DNA, 76 bp, Homo sapiens
accttctctttctttcatctccaactctgagaagcgcatcattgcacgctagaaagagaacggagatggaaaaaaa

SEQ ID NO: 192876 - DNA, 68 bp, Homo sapiens
tatttggaaatgaaatttaactcaaaaggtttatgtaagattctagtaataaaaatttgaagaactga

SEQ ID NO: 192877 - DNA, 69 bp, Homo sapiens
tgaaatttaactcaaaaggtttatgtaagattctagtaataaaaatttgaagaactgacctcacagtaa

SEQ ID NO: 192878 - DNA, 71 bp, Homo sapiens
ctcaaaaggtttatgtaagattctagtaataaaaatttgaagaactgacctcacagtaagcagcgggtaga

SEQ ID NO: 192879 - DNA, 71 bp, Homo sapiens
ggtttatgtaagattctagtaataaaaatttgaagaactgacctcacagtaagcagcgggtagacataaaa

SEQ ID NO: 192880 - DNA, 73 bp, Homo sapiens
ttctagtaataaaaatttgaagaactgacctcacagtaagcagcgggtagacataaaatactgtcctcttgta

SEQ ID NO: 192881 - DNA, 72 bp, Homo sapiens
aaaaatttgaagaactgacctcacagtaagcagcgggtagacataaaatactgtcctcttgtaatccttcca

SEQ ID NO: 192882 - DNA, 75 bp, Homo sapiens
aagaactgacctcacagtaagcagcgggtagacataaaatactgtcctcttgtaatccttccatctatgtaatta

SEQ ID NO: 192883 - DNA, 73 bp, Homo sapiens
acctcacagtaagcagcgggtagacataaaatactgtcctcttgtaatccttccatctatgtaattaaaatgg

SEQ ID NO: 192884 - DNA, 76 bp, Homo sapiens
taagcagcgggtagacataaaatactgtcctcttgtaatccttccatctatgtaattaaaatgggcactcaatgga

SEQ ID NO: 192885 - DNA, 76 bp, Homo sapiens
ggtagacataaaatactgtcctcttgtaatccttccatctatgtaattaaaatgggcactcaatggatcatttaga

SEQ ID NO: 192886 - DNA, 76 bp, Homo sapiens
actgtcctcttgtaatccttccatctatgtaattaaaatgggcactcaatggatcatttagataacttcatccatt

SEQ ID NO: 192887 - DNA, 76 bp, Homo sapiens
ctcttgtaatccttccatctatgtaattaaaatgggcactcaatggatcatttagataacttcatccatttttata

SEQ ID NO: 192888 - DNA, 77 bp, Homo sapiens
ttttcctttctttttggtgaaaaatttgcatgaatcccacagacatgcggctgctacacatctctaccaggtatcaa

SEQ ID NO: 192889 - DNA, 80 bp, Homo sapiens
tttttggtgaaaaatttgcatgaatcccacagacatgcggctgctacacatctctaccaggtatcaagtaaggcattcta

SEQ ID NO: 192890 - DNA, 83 bp, Homo sapiens
aaaatttgcatgaatcccacagacatgcggctgctacacatctctaccaggtatcaagtaaggcattctaagcagcacttcta

SEQ ID NO: 192891 - DNA, 82 bp, Homo sapiens
atgaatcccacagacatgcggctgctacacatctctaccaggtatcaagtaaggcattctaagcagcacttctaggtatatt

SEQ ID NO: 192892 - DNA, 83 bp, Homo sapiens
acagacatgcggctgctacacatctctaccaggtatcaagtaaggcattctaagcagcacttctaggtatatttgctatctta

SEQ ID NO: 192893 - DNA, 82 bp, Homo sapiens
ctgctacacatctctaccaggtatcaagtaaggcattctaagcagcacttctaggtatatttgctatcttacaggcagagaa

SEQ ID NO: 192894 - DNA, 79 bp, Homo sapiens
atctctaccaggtatcaagtaaggcattctaagcagcacttctaggtatatttgctatcttacaggcagagaaatcaaa

SEQ ID NO: 192895 - DNA, 80 bp, Homo sapiens
aggtatcaagtaaggcattctaagcagcacttctaggtatatttgctatcttacaggcagagaaatcaaagcaattgata

SEQ ID NO: 192896 - DNA, 78 bp, Homo sapiens
aagtaaggcattctaagcagcacttctaggtatatttgctatcttacaggcagagaaatcaaagcaattgataggtaa

SEQ ID NO: 192897 - DNA, 80 bp, Homo sapiens
agcagcacttctaggtatatttgctatcttacaggcagagaaatcaaagcaattgataggtaaacgtcatgcagtcttta

SEQ ID NO: 192898 - DNA, 78 bp, Homo sapiens
acttctaggtatatttgctatcttacaggcagagaaatcaaagcaattgataggtaaacgtcatgcagtctttagata

SEQ ID NO: 192899 - DNA, 79 bp, Homo sapiens
tatttgctatcttacaggcagagaaatcaaagcaattgataggtaaacgtcatgcagtctttagatacccttcacaata

SEQ ID NO: 192900 - DNA, 76 bp, Homo sapiens
atcttacaggcagagaaatcaaagcaattgataggtaaacgtcatgcagtctttagatacccttcacaataattaa

SEQ ID NO: 192901 - DNA, 73 bp, Homo sapiens
gagaaatcaaagcaattgataggtaaacgtcatgcagtctttagatacccttcacaataattaaaacatcggt

SEQ ID NO: 192902 - DNA, 76 bp, Homo sapiens
agcaattgataggtaaacgtcatgcagtctttagatacccttcacaataattaaaacatcggttatcagcaattga

SEQ ID NO: 192903 - DNA, 74 bp, Homo sapiens
ataggtaaacgtcatgcagtctttagatacccttcacaataattaaaacatcggttatcagcaattgagtggag

SEQ ID NO: 192904 - DNA, 75 bp, Homo sapiens
tgcagtctttagatacccttcacaataattaaaacatcggttatcagcaattgagtggagttcccttataatcta

SEQ ID NO: 192905 - DNA, 74 bp, Homo sapiens
gcagtctttagatacccttcacaataattaaaacatcggttatcagcaattgagtggagttcccttataatcta

SEQ ID NO: 192906 - DNA, 73 bp, Homo sapiens
ctttagatacccttcacaataattaaaacatcggttatcagcaattgagtggagttcccttataatctacaga

SEQ ID NO: 192907 - DNA, 73 bp, Homo sapiens
gatacccttcacaataattaaaacatcggttatcagcaattgagtggagttcccttataatctacagaataac

SEQ ID NO: 192908 - DNA, 74 bp, Homo sapiens
attaaaacatcggttatcagcaattgagtggagttcccttataatctacagaataacttaaagcatccagacac

SEQ ID NO: 192909 - DNA, 76 bp, Homo sapiens
aaacatcggttatcagcaattgagtggagttcccttataatctacagaataacttaaagcatccagacacgcctca

SEQ ID NO: 192910 - DNA, 80 bp, Homo sapiens
ttatcagcaattgagtggagttcccttataatctacagaataacttaaagcatccagacacgcctcagtgctaccactca

SEQ ID NO: 192911 - DNA, 75 bp, Homo sapiens
aattgagtggagttcccttataatctacagaataacttaaagcatccagacacgcctcagtgctaccactcacgt

SEQ ID NO: 192912 - DNA, 82 bp, Homo sapiens
tataatctacagaataacttaaagcatccagacacgcctcagtgctaccactcacgttctcttactggccacattgcatata

SEQ ID NO: 192913 - DNA, 79 bp, Homo sapiens
agaataacttaaagcatccagacacgcctcagtgctaccactcacgttctcttactggccacattgcatatattcaaat

SEQ ID NO: 192914 - DNA, 79 bp, Homo sapiens
aacttaaagcatccagacacgcctcagtgctaccactcacgttctcttactggccacattgcatatattcaaattacca

SEQ ID NO: 192915 - DNA, 82 bp, Homo sapiens
atccagacacgcctcagtgctaccactcacgttctcttactggccacattgcatatattcaaattaccacaagcttcattca

SEQ ID NO: 192916 - DNA, 80 bp, Homo sapiens
agtgctaccactcacgttctcttactggccacattgcatatattcaaattaccacaagcttcattcaccaaatctgcctg

SEQ ID NO: 192917 - DNA, 80 bp, Homo sapiens
taccactcacgttctcttactggccacattgcatatattcaaattaccacaagcttcattcaccaaatctgcctggtgcc

SEQ ID NO: 192918 - DNA, 79 bp, Homo sapiens
tggccacattgcatatattcaaattaccacaagcttcattcaccaaatctgcctggtgccctgccctaccatactcccc

SEQ ID NO: 192919 - DNA, 75 bp, Homo sapiens
tatattcaaattaccacaagcttcattcaccaaatctgcctggtgccctgccctaccatactcccccaatcctgt

SEQ ID NO: 192920 - DNA, 71 bp, Homo sapiens
aatctgcctggtgccctgccctaccatactcccccaatcctgtttacacattaaaaaactgacaactggta

SEQ ID NO: 192921 - DNA, 66 bp, Homo sapiens
ccctaccatactcccccaatcctgtttacacattaaaaaactgacaactggtaaagtaactgaaat

SEQ ID NO: 192922 - DNA, 67 bp, Homo sapiens
atactcccccaatcctgtttacacattaaaaaactgacaactggtaaagtaactgaaattcaggtgg

SEQ ID NO: 192923 - DNA, 67 bp, Homo sapiens
aatcctgtttacacattaaaaaactgacaactggtaaagtaactgaaattcaggtgggggggctcac

SEQ ID NO: 192924 - DNA, 68 bp, Homo sapiens
acattaaaaaactgacaactggtaaagtaactgaaattcaggtgggggggctcacctgcaatgcccgt

SEQ ID NO: 192925 - DNA, 70 bp, Homo sapiens
aaactgacaactggtaaagtaactgaaattcaggtgggggggctcacctgcaatgcccgttgctcccggc

SEQ ID NO: 192926 - DNA, 77 bp, Homo sapiens
aaagtaactgaaattcaggtgggggggctcacctgcaatgcccgttgctcccggctgagctgactggaatctgcata

SEQ ID NO: 192927 - DNA, 80 bp, Homo sapiens
acctgcaatgcccgttgctcccggctgagctgactggaatctgcatacagttcggtagtgacacatttgaatcggtcacc

SEQ ID NO: 192928 - DNA, 77 bp, Homo sapiens
cccgttgctcccggctgagctgactggaatctgcatacagttcggtagtgacacatttgaatcggtcacccacgtaa

SEQ ID NO: 192929 - DNA, 77 bp, Homo sapiens
ccggctgagctgactggaatctgcatacagttcggtagtgacacatttgaatcggtcacccacgtaacccgctgagt

SEQ ID NO: 192930 - DNA, 78 bp, Homo sapiens
tgactggaatctgcatacagttcggtagtgacacatttgaatcggtcacccacgtaacccgctgagttggcgattctc

SEQ ID NO: 192931 - DNA, 76 bp, Homo sapiens
aatctgcatacagttcggtagtgacacatttgaatcggtcacccacgtaacccgctgagttggcgattctctttgc

SEQ ID NO: 192932 - DNA, 74 bp, Homo sapiens
acccacgtaacccgctgagttggcgattctctttgccagcttagatggcttcggtttcagaactttgccatcat

SEQ ID NO: 192933 - DNA, 77 bp, Homo sapiens
aacccgctgagttggcgattctctttgccagcttagatggcttcggtttcagaactttgccatcatttgattcagcc

SEQ ID NO: 192934 - DNA, 82 bp, Homo sapiens
ttggcgattctctttgccagcttagatggcttcggtttcagaactttgccatcatttgattcagcctcatcagctccatctt

SEQ ID NO: 192935 - DNA, 81 bp, Homo sapiens
tttgccagcttagatggcttcggtttcagaactttgccatcatttgattcagcctcatcagctccatctttggtataggtg

SEQ ID NO: 192936 - DNA, 79 bp, Homo sapiens
ttagatggcttcggtttcagaactttgccatcatttgattcagcctcatcagctccatctttggtataggtgggggtca

SEQ ID NO: 192937 - DNA, 79 bp, Homo sapiens
ttcggtttcagaactttgccatcatttgattcagcctcatcagctccatctttggtataggtgggggtcacatccacac

SEQ ID NO: 192938 - DNA, 78 bp, Homo sapiens
agaactttgccatcatttgattcagcctcatcagctccatctttggtataggtgggggtcacatccacacttggtggg

SEQ ID NO: 192939 - DNA, 75 bp, Homo sapiens
cctcatcagctccatctttggtataggtgggggtcacatccacacttggtggggcactgcccacacaaaatggtt

SEQ ID NO: 192940 - DNA, 73 bp, Homo sapiens
agctccatctttggtataggtgggggtcacatccacacttggtggggcactgcccacacaaaatggtttggga

SEQ ID NO: 192941 - DNA, 70 bp, Homo sapiens
gggtcacatccacacttggtggggcactgcccacacaaaatggtttgggatcctcttgggttttaccaaa

SEQ ID NO: 192942 - DNA, 68 bp, Homo sapiens
atccacacttggtggggcactgcccacacaaaatggtttgggatcctcttgggttttaccaaaagtta

SEQ ID NO: 192943 - DNA, 69 bp, Homo sapiens
ttggtggggcactgcccacacaaaatggtttgggatcctcttgggttttaccaaaagttacagcagggc

SEQ ID NO: 192944 - DNA, 68 bp, Homo sapiens
aaaatggtttgggatcctcttgggttttaccaaaagttacagcagggccatcgctccccagaggtggc

SEQ ID NO: 192945 - DNA, 73 bp, Homo sapiens
aaaagttacagcagggccatcgctccccagaggtggctccaggaatggagtcgagactggcaaccctaggttc

SEQ ID NO: 192946 - DNA, 73 bp, Homo sapiens
agggccatcgctccccagaggtggctccaggaatggagtcgagactggcaaccctaggttctctttgttggta

SEQ ID NO: 192947 - DNA, 74 bp, Homo sapiens
tccccagaggtggctccaggaatggagtcgagactggcaaccctaggttctctttgttggtacctgccagaaca

SEQ ID NO: 192948 - DNA, 75 bp, Homo sapiens
tggctccaggaatggagtcgagactggcaaccctaggttctctttgttggtacctgccagaacactgtccttgct

SEQ ID NO: 192949 - DNA, 73 bp, Homo sapiens
aatggagtcgagactggcaaccctaggttctctttgttggtacctgccagaacactgtccttgcttacggtga

SEQ ID NO: 192950 - DNA, 72 bp, Homo sapiens
agtcgagactggcaaccctaggttctctttgttggtacctgccagaacactgtccttgcttacggtgaagac

SEQ ID NO: 192951 - DNA, 71 bp, Homo sapiens
aaccctaggttctctttgttggtacctgccagaacactgtccttgcttacggtgaagactggctgtttgaa

SEQ ID NO: 192952 - DNA, 72 bp, Homo sapiens
ttctctttgttggtacctgccagaacactgtccttgcttacggtgaagactggctgtttgaaagtataagtt

SEQ ID NO: 192953 - DNA, 75 bp, Homo sapiens
tacctgccagaacactgtccttgcttacggtgaagactggctgtttgaaagtataagtttcgtggaagtcactga

SEQ ID NO: 192954 - DNA, 74 bp, Homo sapiens
agaacactgtccttgcttacggtgaagactggctgtttgaaagtataagtttcgtggaagtcactgatgcgccc

SEQ ID NO: 192955 - DNA, 74 bp, Homo sapiens
tgtccttgcttacggtgaagactggctgtttgaaagtataagtttcgtggaagtcactgatgcgccccaactcc

SEQ ID NO: 192956 - DNA, 77 bp, Homo sapiens
tgaagactggctgtttgaaagtataagtttcgtggaagtcactgatgcgccccaactcctctctcagggcgatgaaa

SEQ ID NO: 192957 - DNA, 76 bp, Homo sapiens
ctgtttgaaagtataagtttcgtggaagtcactgatgcgccccaactcctctctcagggcgatgaaatcacggtgc

SEQ ID NO: 192958 - DNA, 78 bp, Homo sapiens
aaagtataagtttcgtggaagtcactgatgcgccccaactcctctctcagggcgatgaaatcacggtgctgctgcagg

SEQ ID NO: 192959 - DNA, 81 bp, Homo sapiens
aagtcactgatgcgccccaactcctctctcagggcgatgaaatcacggtgctgctgcagggccggctcaactgagggcttg

SEQ ID NO: 192960 - DNA, 82 bp, Homo sapiens
ctctctcagggcgatgaaatcacggtgctgctgcagggccggctcaactgagggcttggggggctcagcgctctggccaaca

SEQ ID NO: 192961 - DNA, 84 bp, Homo sapiens
gatgaaatcacggtgctgctgcagggccggctcaactgagggcttggggggctcagcgctctggccaacactctctgctgcaaa

SEQ ID NO: 192962 - DNA, 83 bp, Homo sapiens
aatcacggtgctgctgcagggccggctcaactgagggcttggggggctcagcgctctggccaacactctctgctgcaaagctg

SEQ ID NO: 192963 - DNA, 79 bp, Homo sapiens
ctcaactgagggcttggggggctcagcgctctggccaacactctctgctgcaaagctgggtttggacacgtttgtgtca

SEQ ID NO: 192964 - DNA, 76 bp, Homo sapiens
gggcttggggggctcagcgctctggccaacactctctgctgcaaagctgggtttggacacgtttgtgtcagtttta

SEQ ID NO: 192965 - DNA, 81 bp, Homo sapiens
gctcagcgctctggccaacactctctgctgcaaagctgggtttggacacgtttgtgtcagttttagcatctggttcttctc

SEQ ID NO: 192966 - DNA, 78 bp, Homo sapiens
tctggccaacactctctgctgcaaagctgggtttggacacgtttgtgtcagttttagcatctggttcttctcggagaa

SEQ ID NO: 192967 - DNA, 76 bp, Homo sapiens
acactctctgctgcaaagctgggtttggacacgtttgtgtcagttttagcatctggttcttctcggagaaggtcta

SEQ ID NO: 192968 - DNA, 72 bp, Homo sapiens
caaagctgggtttggacacgtttgtgtcagttttagcatctggttcttctcggagaaggtctacgtagacaa

SEQ ID NO: 192969 - DNA, 73 bp, Homo sapiens
tttggacacgtttgtgtcagttttagcatctggttcttctcggagaaggtctacgtagacaagcttgtcgctt

SEQ ID NO: 192970 - DNA, 75 bp, Homo sapiens
tttgtgtcagttttagcatctggttcttctcggagaaggtctacgtagacaagcttgtcgcttttgacaacagtc

SEQ ID NO: 192971 - DNA, 72 bp, Homo sapiens
gttttagcatctggttcttctcggagaaggtctacgtagacaagcttgtcgcttttgacaacagtcttccct

SEQ ID NO: 192972 - DNA, 73 bp, Homo sapiens
atctggttcttctcggagaaggtctacgtagacaagcttgtcgcttttgacaacagtcttcccttgattccag

SEQ ID NO: 192973 - DNA, 71 bp, Homo sapiens
ttctcggagaaggtctacgtagacaagcttgtcgcttttgacaacagtcttcccttgattccagttggggt

SEQ ID NO: 192974 - DNA, 70 bp, Homo sapiens
aggtctacgtagacaagcttgtcgcttttgacaacagtcttcccttgattccagttggggttcggcttta

SEQ ID NO: 192975 - DNA, 72 bp, Homo sapiens
ttgattccagttggggttcggctttaggttcttgtcggtggggacatctggatgtaacttggtgctgctagt

SEQ ID NO: 192976 - DNA, 70 bp, Homo sapiens
ttggggttcggctttaggttcttgtcggtggggacatctggatgtaacttggtgctgctagtttccaaaa

SEQ ID NO: 192977 - DNA, 71 bp, Homo sapiens
gctttaggttcttgtcggtggggacatctggatgtaacttggtgctgctagtttccaaaatctcggaaaac

SEQ ID NO: 192978 - DNA, 70 bp, Homo sapiens
aggttcttgtcggtggggacatctggatgtaacttggtgctgctagtttccaaaatctcggaaaaccgat

SEQ ID NO: 192979 - DNA, 68 bp, Homo sapiens
gatgtaacttggtgctgctagtttccaaaatctcggaaaaccgattccggagggttgggtcctcgtaa

SEQ ID NO: 192980 - DNA, 65 bp, Homo sapiens
aacttggtgctgctagtttccaaaatctcggaaaaccgattccggagggttgggtcctcgtaacg

SEQ ID NO: 192981 - DNA, 66 bp, Homo sapiens
agtttccaaaatctcggaaaaccgattccggagggttgggtcctcgtaacgggctctctcatggga

SEQ ID NO: 192982 - DNA, 65 bp, Homo sapiens
aaaatctcggaaaaccgattccggagggttgggtcctcgtaacgggctctctcatgggaccggga

SEQ ID NO: 192983 - DNA, 67 bp, Homo sapiens
aaaaccgattccggagggttgggtcctcgtaacgggctctctcatgggaccgggatctcctctctgg

SEQ ID NO: 192984 - DNA, 73 bp, Homo sapiens
tgggtcctcgtaacgggctctctcatgggaccgggatctcctctctggtttctcctctttagtaatctctatg

SEQ ID NO: 192985 - DNA, 77 bp, Homo sapiens
ggctctctcatgggaccgggatctcctctctggtttctcctctttagtaatctctatgggcgtgtgtggtatcaaca

SEQ ID NO: 192986 - DNA, 77 bp, Homo sapiens
tctcatgggaccgggatctcctctctggtttctcctctttagtaatctctatgggcgtgtgtggtatcaacatggga

SEQ ID NO: 192987 - DNA, 78 bp, Homo sapiens
atctcctctctggtttctcctctttagtaatctctatgggcgtgtgtggtatcaacatgggatgcaccatgcccaacc

SEQ ID NO: 192988 - DNA, 78 bp, Homo sapiens
agtaatctctatgggcgtgtgtggtatcaacatgggatgcaccatgcccaaccccagggcatcttggtaggtcacaaa

SEQ ID NO: 192989 - DNA, 77 bp, Homo sapiens
atgggcgtgtgtggtatcaacatgggatgcaccatgcccaaccccagggcatcttggtaggtcacaaactctggacg

SEQ ID NO: 192990 - DNA, 75 bp, Homo sapiens
gtatcaacatgggatgcaccatgcccaaccccagggcatcttggtaggtcacaaactctggacggccggtgggaa

SEQ ID NO: 192991 - DNA, 74 bp, Homo sapiens
atgggatgcaccatgcccaaccccagggcatcttggtaggtcacaaactctggacggccggtgggaagcccata

SEQ ID NO: 192992 - DNA, 71 bp, Homo sapiens
cccagggcatcttggtaggtcacaaactctggacggccggtgggaagcccatagggcagcccaggctttgg

SEQ ID NO: 192993 - DNA, 70 bp, Homo sapiens
atcttggtaggtcacaaactctggacggccggtgggaagcccatagggcagcccaggctttggggcaagg

SEQ ID NO: 192994 - DNA, 73 bp, Homo sapiens
tggacggccggtgggaagcccatagggcagcccaggctttggggcaaggtgcccaggaaacagactgccattg

SEQ ID NO: 192995 - DNA, 72 bp, Homo sapiens
tgggaagcccatagggcagcccaggctttggggcaaggtgcccaggaaacagactgccattgggtaacaaaa

SEQ ID NO: 192996 - DNA, 71 bp, Homo sapiens
atagggcagcccaggctttggggcaaggtgcccaggaaacagactgccattgggtaacaaaactgggtgag

SEQ ID NO: 192997 - DNA, 72 bp, Homo sapiens
caaggtgcccaggaaacagactgccattgggtaacaaaactgggtgagggtagacaggtcctttgccatgta

SEQ ID NO: 192998 - DNA, 70 bp, Homo sapiens
aggaaacagactgccattgggtaacaaaactgggtgagggtagacaggtcctttgccatgtaaggagagg

SEQ ID NO: 192999 - DNA, 70 bp, Homo sapiens
agactgccattgggtaacaaaactgggtgagggtagacaggtcctttgccatgtaaggagaggggactta

SEQ ID NO: 193000 - DNA, 71 bp, Homo sapiens
attgggtaacaaaactgggtgagggtagacaggtcctttgccatgtaaggagaggggacttacagcaatgc

SEQ ID NO: 193001 - DNA, 71 bp, Homo sapiens
aaaactgggtgagggtagacaggtcctttgccatgtaaggagaggggacttacagcaatgccctcaggggc

SEQ ID NO: 193002 - DNA, 72 bp, Homo sapiens
tagacaggtcctttgccatgtaaggagaggggacttacagcaatgccctcaggggctgggtaagggaggtaa

SEQ ID NO: 193003 - DNA, 70 bp, Homo sapiens
ctttgccatgtaaggagaggggacttacagcaatgccctcaggggctgggtaagggaggtaactcctggg

SEQ ID NO: 193004 - DNA, 68 bp, Homo sapiens
atgtaaggagaggggacttacagcaatgccctcaggggctgggtaagggaggtaactcctggggtagg

SEQ ID NO: 193005 - DNA, 67 bp, Homo sapiens
gggacttacagcaatgccctcaggggctgggtaagggaggtaactcctggggtagggaattggtggg

SEQ ID NO: 193006 - DNA, 69 bp, Homo sapiens
tacagcaatgccctcaggggctgggtaagggaggtaactcctggggtagggaattggtggggacctgaa

SEQ ID NO: 193007 - DNA, 67 bp, Homo sapiens
aggggctgggtaagggaggtaactcctggggtagggaattggtggggacctgaatgcctcatttgga

SEQ ID NO: 193008 - DNA, 70 bp, Homo sapiens
gtaagggaggtaactcctggggtagggaattggtggggacctgaatgcctcatttggagacagaaatata

SEQ ID NO: 193009 - DNA, 73 bp, Homo sapiens
taactcctggggtagggaattggtggggacctgaatgcctcatttggagacagaaatatagagcttggtggaa

SEQ ID NO: 193010 - DNA, 73 bp, Homo sapiens
gtagggaattggtggggacctgaatgcctcatttggagacagaaatatagagcttggtggaaggccgttctcg

SEQ ID NO: 193011 - DNA, 73 bp, Homo sapiens
attggtggggacctgaatgcctcatttggagacagaaatatagagcttggtggaaggccgttctcgtttgctt

SEQ ID NO: 193012 - DNA, 75 bp, Homo sapiens
tgaatgcctcatttggagacagaaatatagagcttggtggaaggccgttctcgtttgctttgaaactcggttctg

SEQ ID NO: 193013 - DNA, 71 bp, Homo sapiens
atttggagacagaaatatagagcttggtggaaggccgttctcgtttgctttgaaactcggttctgggttgc

SEQ ID NO: 193014 - DNA, 71 bp, Homo sapiens
tatagagcttggtggaaggccgttctcgtttgctttgaaactcggttctgggttgctggctttggcgccct

SEQ ID NO: 193015 - DNA, 77 bp, Homo sapiens
cgttctcgtttgctttgaaactcggttctgggttgctggctttggcgcccttgctgctggtgctgctactgtgcttg

SEQ ID NO: 193016 - DNA, 78 bp, Homo sapiens
ctttgaaactcggttctgggttgctggctttggcgcccttgctgctggtgctgctactgtgcttggcaggagtggccg

SEQ ID NO: 193017 - DNA, 79 bp, Homo sapiens
ctcggttctgggttgctggctttggcgcccttgctgctggtgctgctactgtgcttggcaggagtggccgggggctggc

SEQ ID NO: 193018 - DNA, 82 bp, Homo sapiens
ttgctggctttggcgcccttgctgctggtgctgctactgtgcttggcaggagtggccgggggctggcccacgtgctgaataa

SEQ ID NO: 193019 - DNA, 80 bp, Homo sapiens
tttggcgcccttgctgctggtgctgctactgtgcttggcaggagtggccgggggctggcccacgtgctgaataacggatg

SEQ ID NO: 193020 - DNA, 75 bp, Homo sapiens
ttggcaggagtggccgggggctggcccacgtgctgaataacggatggtgtggtttctacagagctcctgctggtt

SEQ ID NO: 193021 - DNA, 73 bp, Homo sapiens
ggagtggccgggggctggcccacgtgctgaataacggatggtgtggtttctacagagctcctgctggttttgg

SEQ ID NO: 193022 - DNA, 80 bp, Homo sapiens
tggcccacgtgctgaataacggatggtgtggtttctacagagctcctgctggttttggtgccatctgcattggcattggg

SEQ ID NO: 193023 - DNA, 78 bp, Homo sapiens
acgtgctgaataacggatggtgtggtttctacagagctcctgctggttttggtgccatctgcattggcattgggggcg

SEQ ID NO: 193024 - DNA, 78 bp, Homo sapiens
ataacggatggtgtggtttctacagagctcctgctggttttggtgccatctgcattggcattgggggcgggtgatgcg

SEQ ID NO: 193025 - DNA, 79 bp, Homo sapiens
gtgtggtttctacagagctcctgctggttttggtgccatctgcattggcattgggggcgggtgatgcggaggctgggcg

SEQ ID NO: 193026 - DNA, 79 bp, Homo sapiens
ccatctgcattggcattgggggcgggtgatgcggaggctgggcggcctgcactcgacactgaccctgaaacgttagtga

SEQ ID NO: 193027 - DNA, 79 bp, Homo sapiens
attggcattgggggcgggtgatgcggaggctgggcggcctgcactcgacactgaccctgaaacgttagtgatgacagca

SEQ ID NO: 193028 - DNA, 80 bp, Homo sapiens
ggcgggtgatgcggaggctgggcggcctgcactcgacactgaccctgaaacgttagtgatgacagcatcggtgccgccca

SEQ ID NO: 193029 - DNA, 84 bp, Homo sapiens
tgcggaggctgggcggcctgcactcgacactgaccctgaaacgttagtgatgacagcatcggtgccgcccatgcgcgggcatga

SEQ ID NO: 193030 - DNA, 83 bp, Homo sapiens
tgggcggcctgcactcgacactgaccctgaaacgttagtgatgacagcatcggtgccgcccatgcgcgggcatgatgaactcc

SEQ ID NO: 193031 - DNA, 83 bp, Homo sapiens
actcgacactgaccctgaaacgttagtgatgacagcatcggtgccgcccatgcgcgggcatgatgaactccgctgctgtggta

SEQ ID NO: 193032 - DNA, 83 bp, Homo sapiens
actgaccctgaaacgttagtgatgacagcatcggtgccgcccatgcgcgggcatgatgaactccgctgctgtggtatcgccca

SEQ ID NO: 193033 - DNA, 83 bp, Homo sapiens
aaacgttagtgatgacagcatcggtgccgcccatgcgcgggcatgatgaactccgctgctgtggtatcgcccagtccaatgcc

SEQ ID NO: 193034 - DNA, 85 bp, Homo sapiens
gtgatgacagcatcggtgccgcccatgcgcgggcatgatgaactccgctgctgtggtatcgcccagtccaatgccttgtttttca

SEQ ID NO: 193035 - DNA, 82 bp, Homo sapiens
gtgccgcccatgcgcgggcatgatgaactccgctgctgtggtatcgcccagtccaatgccttgtttttcagcgacatgcttt

SEQ ID NO: 193036 - DNA, 82 bp, Homo sapiens
atgcgcgggcatgatgaactccgctgctgtggtatcgcccagtccaatgccttgtttttcagcgacatgcttttgccattgt

SEQ ID NO: 193037 - DNA, 80 bp, Homo sapiens
atgatgaactccgctgctgtggtatcgcccagtccaatgccttgtttttcagcgacatgcttttgccattgttctcttcg

SEQ ID NO: 193038 - DNA, 77 bp, Homo sapiens
aactccgctgctgtggtatcgcccagtccaatgccttgtttttcagcgacatgcttttgccattgttctcttcgtta

SEQ ID NO: 193039 - DNA, 76 bp, Homo sapiens
ctgtggtatcgcccagtccaatgccttgtttttcagcgacatgcttttgccattgttctcttcgttaggacttggc

SEQ ID NO: 193040 - DNA, 73 bp, Homo sapiens
agtccaatgccttgtttttcagcgacatgcttttgccattgttctcttcgttaggacttggcccgggcaccac

SEQ ID NO: 193041 - DNA, 73 bp, Homo sapiens
ccttgtttttcagcgacatgcttttgccattgttctcttcgttaggacttggcccgggcaccacccaggatga

SEQ ID NO: 193042 - DNA, 79 bp, Homo sapiens
attgttctcttcgttaggacttggcccgggcaccacccaggatgagggagcagtgctgatgatttcagatctatagata

SEQ ID NO: 193043 - DNA, 80 bp, Homo sapiens
tcgttaggacttggcccgggcaccacccaggatgagggagcagtgctgatgatttcagatctatagatagcacaaccatt

SEQ ID NO: 193044 - DNA, 81 bp, Homo sapiens
cccgggcaccacccaggatgagggagcagtgctgatgatttcagatctatagatagcacaaccatttcctggaggagatag

SEQ ID NO: 193045 - DNA, 81 bp, Homo sapiens
acccaggatgagggagcagtgctgatgatttcagatctatagatagcacaaccatttcctggaggagatagtgtttctttc

SEQ ID NO: 193046 - DNA, 83 bp, Homo sapiens
atgagggagcagtgctgatgatttcagatctatagatagcacaaccatttcctggaggagatagtgtttctttcggaatctca

SEQ ID NO: 193047 - DNA, 73 bp, Homo sapiens
acaaccatttcctggaggagatagtgtttctttcggaatctcacttccggagagcactaagccacttccagcc

SEQ ID NO: 193048 - DNA, 76 bp, Homo sapiens
ttcctggaggagatagtgtttctttcggaatctcacttccggagagcactaagccacttccagccctgctgtgaac

SEQ ID NO: 193049 - DNA, 74 bp, Homo sapiens
atagtgtttctttcggaatctcacttccggagagcactaagccacttccagccctgctgtgaaccaggaccgtg

SEQ ID NO: 193050 - DNA, 75 bp, Homo sapiens
tttcggaatctcacttccggagagcactaagccacttccagccctgctgtgaaccaggaccgtgggagccatctt

SEQ ID NO: 193051 - DNA, 77 bp, Homo sapiens
tctcacttccggagagcactaagccacttccagccctgctgtgaaccaggaccgtgggagccatctttttcatgtgg

SEQ ID NO: 193052 - DNA, 77 bp, Homo sapiens
agagcactaagccacttccagccctgctgtgaaccaggaccgtgggagccatctttttcatgtggtcagctttggaa

SEQ ID NO: 193053 - DNA, 78 bp, Homo sapiens
acttccagccctgctgtgaaccaggaccgtgggagccatctttttcatgtggtcagctttggaagcatctacatccac

SEQ ID NO: 193054 - DNA, 75 bp, Homo sapiens
aaccaggaccgtgggagccatctttttcatgtggtcagctttggaagcatctacatccaccactttagaagacaa

SEQ ID NO: 193055 - DNA, 79 bp, Homo sapiens
tgggagccatctttttcatgtggtcagctttggaagcatctacatccaccactttagaagacaagtctagtggcttatc

SEQ ID NO: 193056 - DNA, 76 bp, Homo sapiens
ttggaagcatctacatccaccactttagaagacaagtctagtggcttatctgtgacgtctttggtaacggtctgct

SEQ ID NO: 193057 - DNA, 74 bp, Homo sapiens
actttagaagacaagtctagtggcttatctgtgacgtctttggtaacggtctgcttctccaacagaggaggtga

SEQ ID NO: 193058 - DNA, 77 bp, Homo sapiens
tgtgacgtctttggtaacggtctgcttctccaacagaggaggtgagctgccatcttttctgtcttgaaccgctgtct

SEQ ID NO: 193059 - DNA, 75 bp, Homo sapiens
tctttggtaacggtctgcttctccaacagaggaggtgagctgccatcttttctgtcttgaaccgctgtcttccgg

SEQ ID NO: 193060 - DNA, 79 bp, Homo sapiens
gtctgcttctccaacagaggaggtgagctgccatcttttctgtcttgaaccgctgtcttccgggcatgcccgggcactg

SEQ ID NO: 193061 - DNA, 79 bp, Homo sapiens
ctccaacagaggaggtgagctgccatcttttctgtcttgaaccgctgtcttccgggcatgcccgggcactggctgggca

SEQ ID NO: 193062 - DNA, 76 bp, Homo sapiens
aggtgagctgccatcttttctgtcttgaaccgctgtcttccgggcatgcccgggcactggctgggcaccttcgccc

SEQ ID NO: 193063 - DNA, 71 bp, Homo sapiens
atcttttctgtcttgaaccgctgtcttccgggcatgcccgggcactggctgggcaccttcgcccccttccg

SEQ ID NO: 193064 - DNA, 73 bp, Homo sapiens
tctgtcttgaaccgctgtcttccgggcatgcccgggcactggctgggcaccttcgcccccttccggagccttg

SEQ ID NO: 193065 - DNA, 73 bp, Homo sapiens
tgtcttccgggcatgcccgggcactggctgggcaccttcgcccccttccggagccttgggatacttgccattg

SEQ ID NO: 193066 - DNA, 74 bp, Homo sapiens
tccgggcatgcccgggcactggctgggcaccttcgcccccttccggagccttgggatacttgccattggagagc

SEQ ID NO: 193067 - DNA, 73 bp, Homo sapiens
ggcaccttcgcccccttccggagccttgggatacttgccattggagagcctggccgcggggaactcgctgcta

SEQ ID NO: 193068 - DNA, 74 bp, Homo sapiens
cccccttccggagccttgggatacttgccattggagagcctggccgcggggaactcgctgctaactgtcatgta

SEQ ID NO: 193069 - DNA, 78 bp, Homo sapiens
ttccggagccttgggatacttgccattggagagcctggccgcggggaactcgctgctaactgtcatgtatggctttga

SEQ ID NO: 193070 - DNA, 79 bp, Homo sapiens
atacttgccattggagagcctggccgcggggaactcgctgctaactgtcatgtatggctttgacagggcaactgaagga

SEQ ID NO: 193071 - DNA, 78 bp, Homo sapiens
attggagagcctggccgcggggaactcgctgctaactgtcatgtatggctttgacagggcaactgaaggagaggtgga

SEQ ID NO: 193072 - DNA, 80 bp, Homo sapiens
ctggccgcggggaactcgctgctaactgtcatgtatggctttgacagggcaactgaaggagaggtggagatcctggcata

SEQ ID NO: 193073 - DNA, 82 bp, Homo sapiens
ggaactcgctgctaactgtcatgtatggctttgacagggcaactgaaggagaggtggagatcctggcatagtgcttgtggaa

SEQ ID NO: 193074 - DNA, 81 bp, Homo sapiens
atgtatggctttgacagggcaactgaaggagaggtggagatcctggcatagtgcttgtggaactccgagtaggtgtctgca

SEQ ID NO: 193075 - DNA, 78 bp, Homo sapiens
aactgaaggagaggtggagatcctggcatagtgcttgtggaactccgagtaggtgtctgcagcaggctgggtgggaag

SEQ ID NO: 193076 - DNA, 78 bp, Homo sapiens
agaggtggagatcctggcatagtgcttgtggaactccgagtaggtgtctgcagcaggctgggtgggaaggtggactcg

SEQ ID NO: 193077 - DNA, 77 bp, Homo sapiens
agatcctggcatagtgcttgtggaactccgagtaggtgtctgcagcaggctgggtgggaaggtggactcggggtgac

SEQ ID NO: 193078 - DNA, 74 bp, Homo sapiens
atagtgcttgtggaactccgagtaggtgtctgcagcaggctgggtgggaaggtggactcggggtgacggccgag

SEQ ID NO: 193079 - DNA, 72 bp, Homo sapiens
gtggaactccgagtaggtgtctgcagcaggctgggtgggaaggtggactcggggtgacggccgaggcgaggg

SEQ ID NO: 193080 - DNA, 72 bp, Homo sapiens
agtaggtgtctgcagcaggctgggtgggaaggtggactcggggtgacggccgaggcgaggggggcaacagga

SEQ ID NO: 193081 - DNA, 71 bp, Homo sapiens
agcaggctgggtgggaaggtggactcggggtgacggccgaggcgaggggggcaacaggagagctgtgtccc

SEQ ID NO: 193082 - DNA, 71 bp, Homo sapiens
tgggaaggtggactcggggtgacggccgaggcgaggggggcaacaggagagctgtgtcccccggcaggcca

SEQ ID NO: 193083 - DNA, 72 bp, Homo sapiens
gtggactcggggtgacggccgaggcgaggggggcaacaggagagctgtgtcccccggcaggccactggtgac

SEQ ID NO: 193084 - DNA, 74 bp, Homo sapiens
ggtgacggccgaggcgaggggggcaacaggagagctgtgtcccccggcaggccactggtgaccgccttggcaga

SEQ ID NO: 193085 - DNA, 71 bp, Homo sapiens
aggcgaggggggcaacaggagagctgtgtcccccggcaggccactggtgaccgccttggcagagggaaccc

SEQ ID NO: 193086 - DNA, 74 bp, Homo sapiens
caacaggagagctgtgtcccccggcaggccactggtgaccgccttggcagagggaaccctgggctgcttactgt

SEQ ID NO: 193087 - DNA, 76 bp, Homo sapiens
agctgtgtcccccggcaggccactggtgaccgccttggcagagggaaccctgggctgcttactgttctggatgtga

SEQ ID NO: 193088 - DNA, 76 bp, Homo sapiens
ccggcaggccactggtgaccgccttggcagagggaaccctgggctgcttactgttctggatgtgaggataggcgtg

SEQ ID NO: 193089 - DNA, 75 bp, Homo sapiens
accgccttggcagagggaaccctgggctgcttactgttctggatgtgaggataggcgtgggaatcaacaggattc

SEQ ID NO: 193090 - DNA, 75 bp, Homo sapiens
agagggaaccctgggctgcttactgttctggatgtgaggataggcgtgggaatcaacaggattcccagggctgac

SEQ ID NO: 193091 - DNA, 78 bp, Homo sapiens
tgggctgcttactgttctggatgtgaggataggcgtgggaatcaacaggattcccagggctgacgcccatcttccacg

SEQ ID NO: 193092 - DNA, 75 bp, Homo sapiens
aatcaacaggattcccagggctgacgcccatcttccacgggaggcttttgtctgcgcaatggacgagaggcggga

SEQ ID NO: 193093 - DNA, 75 bp, Homo sapiens
aggattcccagggctgacgcccatcttccacgggaggcttttgtctgcgcaatggacgagaggcgggatggctgg

SEQ ID NO: 193094 - DNA, 76 bp, Homo sapiens
ggctggggaggccgaaggtgtcgagagcctcatgggtgatgccaaggacgatgggatgtggggaccgacgtagtga

SEQ ID NO: 193095 - DNA, 76 bp, Homo sapiens
gctggggaggccgaaggtgtcgagagcctcatgggtgatgccaaggacgatgggatgtggggaccgacgtagtgag

SEQ ID NO: 193096 - DNA, 75 bp, Homo sapiens
aggccgaaggtgtcgagagcctcatgggtgatgccaaggacgatgggatgtggggaccgacgtagtgaggtggcg

SEQ ID NO: 193097 - DNA, 78 bp, Homo sapiens
tgtcgagagcctcatgggtgatgccaaggacgatgggatgtggggaccgacgtagtgaggtggcggcaggtagagaaa

SEQ ID NO: 193098 - DNA, 76 bp, Homo sapiens
ctcatgggtgatgccaaggacgatgggatgtggggaccgacgtagtgaggtggcggcaggtagagaaagcgctccc

SEQ ID NO: 193099 - DNA, 76 bp, Homo sapiens
atgccaaggacgatgggatgtggggaccgacgtagtgaggtggcggcaggtagagaaagcgctccccattggtgca

SEQ ID NO: 193100 - DNA, 76 bp, Homo sapiens
atgggatgtggggaccgacgtagtgaggtggcggcaggtagagaaagcgctccccattggtgcagactggagaata

SEQ ID NO: 193101 - DNA, 80 bp, Homo sapiens
tagtgaggtggcggcaggtagagaaagcgctccccattggtgcagactggagaatacagcggctgggccaagctgtagga

SEQ ID NO: 193102 - DNA, 80 bp, Homo sapiens
cggcaggtagagaaagcgctccccattggtgcagactggagaatacagcggctgggccaagctgtaggactgctgaggta

SEQ ID NO: 193103 - DNA, 80 bp, Homo sapiens
ggtagagaaagcgctccccattggtgcagactggagaatacagcggctgggccaagctgtaggactgctgaggtagcaag

SEQ ID NO: 193104 - DNA, 83 bp, Homo sapiens
tgcagactggagaatacagcggctgggccaagctgtaggactgctgaggtagcaaggccttgtacatgttcagtgaatactta

SEQ ID NO: 193105 - DNA, 79 bp, Homo sapiens
ctggagaatacagcggctgggccaagctgtaggactgctgaggtagcaaggccttgtacatgttcagtgaatacttatt

SEQ ID NO: 193106 - DNA, 79 bp, Homo sapiens
gctgggccaagctgtaggactgctgaggtagcaaggccttgtacatgttcagtgaatacttatttggcgagtcgaggaa

SEQ ID NO: 193107 - DNA, 76 bp, Homo sapiens
agctgtaggactgctgaggtagcaaggccttgtacatgttcagtgaatacttatttggcgagtcgaggaaagggta

SEQ ID NO: 193108 - DNA, 76 bp, Homo sapiens
aggactgctgaggtagcaaggccttgtacatgttcagtgaatacttatttggcgagtcgaggaaagggtagatggc

SEQ ID NO: 193109 - DNA, 76 bp, Homo sapiens
aggtagcaaggccttgtacatgttcagtgaatacttatttggcgagtcgaggaaagggtagatggctggcgtggca

SEQ ID NO: 193110 - DNA, 74 bp, Homo sapiens
aaggccttgtacatgttcagtgaatacttatttggcgagtcgaggaaagggtagatggctggcgtggcaccctc

SEQ ID NO: 193111 - DNA, 76 bp, Homo sapiens
gtacatgttcagtgaatacttatttggcgagtcgaggaaagggtagatggctggcgtggcaccctccatgtaagga

SEQ ID NO: 193112 - DNA, 76 bp, Homo sapiens
atgttcagtgaatacttatttggcgagtcgaggaaagggtagatggctggcgtggcaccctccatgtaaggattga

SEQ ID NO: 193113 - DNA, 74 bp, Homo sapiens
agtgaatacttatttggcgagtcgaggaaagggtagatggctggcgtggcaccctccatgtaaggattgaccca

SEQ ID NO: 193114 - DNA, 72 bp, Homo sapiens
aatacttatttggcgagtcgaggaaagggtagatggctggcgtggcaccctccatgtaaggattgacccagg

SEQ ID NO: 193115 - DNA, 77 bp, Homo sapiens
tatttggcgagtcgaggaaagggtagatggctggcgtggcaccctccatgtaaggattgacccagggcagccgcaga

SEQ ID NO: 193116 - DNA, 78 bp, Homo sapiens
ggaaagggtagatggctggcgtggcaccctccatgtaaggattgacccagggcagccgcagataactagcaccattga

SEQ ID NO: 193117 - DNA, 80 bp, Homo sapiens
gtggcaccctccatgtaaggattgacccagggcagccgcagataactagcaccattgatgttgagagggctctgtttgtc

SEQ ID NO: 193118 - DNA, 79 bp, Homo sapiens
accctccatgtaaggattgacccagggcagccgcagataactagcaccattgatgttgagagggctctgtttgtcgctg

SEQ ID NO: 193119 - DNA, 82 bp, Homo sapiens
taaggattgacccagggcagccgcagataactagcaccattgatgttgagagggctctgtttgtcgctggcaggcctgtcca

SEQ ID NO: 193120 - DNA, 82 bp, Homo sapiens
agggcagccgcagataactagcaccattgatgttgagagggctctgtttgtcgctggcaggcctgtccaagcccagcgcttc

SEQ ID NO: 193121 - DNA, 84 bp, Homo sapiens
agataactagcaccattgatgttgagagggctctgtttgtcgctggcaggcctgtccaagcccagcgcttctgctgtggctaca

SEQ ID NO: 193122 - DNA, 79 bp, Homo sapiens
gctggcaggcctgtccaagcccagcgcttctgctgtggctacagcacttttttgtattccaggcggtgttttgtatata

SEQ ID NO: 193123 - DNA, 78 bp, Homo sapiens
cctgtccaagcccagcgcttctgctgtggctacagcacttttttgtattccaggcggtgttttgtatatagcactgaa

SEQ ID NO: 193124 - DNA, 77 bp, Homo sapiens
aagcccagcgcttctgctgtggctacagcacttttttgtattccaggcggtgttttgtatatagcactgaagccatt

SEQ ID NO: 193125 - DNA, 74 bp, Homo sapiens
tctgctgtggctacagcacttttttgtattccaggcggtgttttgtatatagcactgaagccatttgggggttt

SEQ ID NO: 193126 - DNA, 72 bp, Homo sapiens
tacagcacttttttgtattccaggcggtgttttgtatatagcactgaagccatttgggggttttccagagac

SEQ ID NO: 193127 - DNA, 72 bp, Homo sapiens
tttttgtattccaggcggtgttttgtatatagcactgaagccatttgggggttttccagagacggcagaagc

SEQ ID NO: 193128 - DNA, 73 bp, Homo sapiens
attccaggcggtgttttgtatatagcactgaagccatttgggggttttccagagacggcagaagcctccactg

SEQ ID NO: 193129 - DNA, 74 bp, Homo sapiens
ttttgtatatagcactgaagccatttgggggttttccagagacggcagaagcctccactgtctcgggtgtattc

SEQ ID NO: 193130 - DNA, 74 bp, Homo sapiens
tatagcactgaagccatttgggggttttccagagacggcagaagcctccactgtctcgggtgtattcggtttga

SEQ ID NO: 193131 - DNA, 73 bp, Homo sapiens
atttgggggttttccagagacggcagaagcctccactgtctcgggtgtattcggtttgaactgcatctctgga

SEQ ID NO: 193132 - DNA, 73 bp, Homo sapiens
gggttttccagagacggcagaagcctccactgtctcgggtgtattcggtttgaactgcatctctggatttctt

SEQ ID NO: 193133 - DNA, 70 bp, Homo sapiens
aagcctccactgtctcgggtgtattcggtttgaactgcatctctggatttctttccgaagaaaacccaag

SEQ ID NO: 193134 - DNA, 71 bp, Homo sapiens
ctgtctcgggtgtattcggtttgaactgcatctctggatttctttccgaagaaaacccaaggccacctaga

SEQ ID NO: 193135 - DNA, 75 bp, Homo sapiens
tgtattcggtttgaactgcatctctggatttctttccgaagaaaacccaaggccacctagagtgcttgtggcagc

SEQ ID NO: 193136 - DNA, 72 bp, Homo sapiens
actgcatctctggatttctttccgaagaaaacccaaggccacctagagtgcttgtggcagcctcccgacctt

SEQ ID NO: 193137 - DNA, 73 bp, Homo sapiens
tctttccgaagaaaacccaaggccacctagagtgcttgtggcagcctcccgacctttctctgagcccagtcca

SEQ ID NO: 193138 - DNA, 75 bp, Homo sapiens
aaacccaaggccacctagagtgcttgtggcagcctcccgacctttctctgagcccagtccacacaagctagaata

SEQ ID NO: 193139 - DNA, 76 bp, Homo sapiens
acctagagtgcttgtggcagcctcccgacctttctctgagcccagtccacacaagctagaatagacgatgtttccc

SEQ ID NO: 193140 - DNA, 75 bp, Homo sapiens
agtgcttgtggcagcctcccgacctttctctgagcccagtccacacaagctagaatagacgatgtttcccgggac

SEQ ID NO: 193141 - DNA, 72 bp, Homo sapiens
ctcccgacctttctctgagcccagtccacacaagctagaatagacgatgtttcccgggacccgcagcccttc

SEQ ID NO: 193142 - DNA, 73 bp, Homo sapiens
ctttctctgagcccagtccacacaagctagaatagacgatgtttcccgggacccgcagcccttcccggatcag

SEQ ID NO: 193143 - DNA, 73 bp, Homo sapiens
ccagtccacacaagctagaatagacgatgtttcccgggacccgcagcccttcccggatcaggccagtgcggtc

SEQ ID NO: 193144 - DNA, 75 bp, Homo sapiens
acacaagctagaatagacgatgtttcccgggacccgcagcccttcccggatcaggccagtgcggtccatgctcag

SEQ ID NO: 193145 - DNA, 78 bp, Homo sapiens
tagaatagacgatgtttcccgggacccgcagcccttcccggatcaggccagtgcggtccatgctcagtgctgccaggc

SEQ ID NO: 193146 - DNA, 83 bp, Homo sapiens
acccgcagcccttcccggatcaggccagtgcggtccatgctcagtgctgccaggccatcgatcctatgggccgtgctcgcatc

SEQ ID NO: 193147 - DNA, 85 bp, Homo sapiens
ttcccggatcaggccagtgcggtccatgctcagtgctgccaggccatcgatcctatgggccgtgctcgcatccacctttgcagaa

SEQ ID NO: 193148 - DNA, 86 bp, Homo sapiens
atcaggccagtgcggtccatgctcagtgctgccaggccatcgatcctatgggccgtgctcgcatccacctttgcagaagaacaaca

SEQ ID NO: 193149 - DNA, 84 bp, Homo sapiens
gtccatgctcagtgctgccaggccatcgatcctatgggccgtgctcgcatccacctttgcagaagaacaacatgggtgttactg

SEQ ID NO: 193150 - DNA, 80 bp, Homo sapiens
agtgctgccaggccatcgatcctatgggccgtgctcgcatccacctttgcagaagaacaacatgggtgttactgggatac

SEQ ID NO: 193151 - DNA, 82 bp, Homo sapiens
acgattgattacagatcactgatatgcagatatggcatcaacagaagctattaatctcttaccacgttgtggttcaagggat

SEQ ID NO: 193152 - DNA, 71 bp, Homo sapiens
aagggattctcttccctcagttccagtctggcttttgaagcgtcaccatcatttacaaggattttcctatt

SEQ ID NO: 193153 - DNA, 71 bp, Homo sapiens
ttctcttccctcagttccagtctggcttttgaagcgtcaccatcatttacaaggattttcctatttaaaaa

SEQ ID NO: 193154 - DNA, 72 bp, Homo sapiens
ttccagtctggcttttgaagcgtcaccatcatttacaaggattttcctatttaaaaagatacaccaacttca

SEQ ID NO: 193155 - DNA, 73 bp, Homo sapiens
gcttttgaagcgtcaccatcatttacaaggattttcctatttaaaaagatacaccaacttcatgaaagcattc

SEQ ID NO: 193156 - DNA, 74 bp, Homo sapiens
aagcgtcaccatcatttacaaggattttcctatttaaaaagatacaccaacttcatgaaagcattcctcactga

SEQ ID NO: 193157 - DNA, 81 bp, Homo sapiens
tcagcatgggcgtgggctccactcaggcccggcccagatgggcgcattcacctgtcttcgctcgccccacacatgcggacc

SEQ ID NO: 193158 - DNA, 81 bp, Homo sapiens
gctccactcaggcccggcccagatgggcgcattcacctgtcttcgctcgccccacacatgcggaccctctcgctgttcatc

SEQ ID NO: 193159 - DNA, 81 bp, Homo sapiens
aggcccggcccagatgggcgcattcacctgtcttcgctcgccccacacatgcggaccctctcgctgttcatccagctgtga

SEQ ID NO: 193160 - DNA, 81 bp, Homo sapiens
agatgggcgcattcacctgtcttcgctcgccccacacatgcggaccctctcgctgttcatccagctgtgaacgttcccata

SEQ ID NO: 193161 - DNA, 79 bp, Homo sapiens
cgcattcacctgtcttcgctcgccccacacatgcggaccctctcgctgttcatccagctgtgaacgttcccatacaggg

SEQ ID NO: 193162 - DNA, 79 bp, Homo sapiens
tgtcttcgctcgccccacacatgcggaccctctcgctgttcatccagctgtgaacgttcccatacaggggggttgctga

SEQ ID NO: 193163 - DNA, 79 bp, Homo sapiens
cccacacatgcggaccctctcgctgttcatccagctgtgaacgttcccatacaggggggttgctgagagcatgtcgtct

SEQ ID NO: 193164 - DNA, 79 bp, Homo sapiens
acatgcggaccctctcgctgttcatccagctgtgaacgttcccatacaggggggttgctgagagcatgtcgtcttctgg

SEQ ID NO: 193165 - DNA, 82 bp, Homo sapiens
tctcgctgttcatccagctgtgaacgttcccatacaggggggttgctgagagcatgtcgtcttctgggatggcagctttgct

SEQ ID NO: 193166 - DNA, 81 bp, Homo sapiens
tccagctgtgaacgttcccatacaggggggttgctgagagcatgtcgtcttctgggatggcagctttgcttcaagcgtcta

SEQ ID NO: 193167 - DNA, 78 bp, Homo sapiens
acgttcccatacaggggggttgctgagagcatgtcgtcttctgggatggcagctttgcttcaagcgtctagtctgtta

SEQ ID NO: 193168 - DNA, 77 bp, Homo sapiens
atacaggggggttgctgagagcatgtcgtcttctgggatggcagctttgcttcaagcgtctagtctgttaaaaggaa

SEQ ID NO: 193169 - DNA, 76 bp, Homo sapiens
gggttgctgagagcatgtcgtcttctgggatggcagctttgcttcaagcgtctagtctgttaaaaggaaagaaaaa

SEQ ID NO: 193170 - DNA, 63 bp, Homo sapiens
cccacccgtccgcggtctcccgggggaaaggtgttccgggcactgacctgaaatccccggtgg

SEQ ID NO: 193171 - DNA, 64 bp, Homo sapiens
gtccgcggtctcccgggggaaaggtgttccgggcactgacctgaaatccccggtgggggagtag

SEQ ID NO: 193172 - DNA, 65 bp, Homo sapiens
ctcccgggggaaaggtgttccgggcactgacctgaaatccccggtgggggagtaggcagggagcc

SEQ ID NO: 193173 - DNA, 71 bp, Homo sapiens
tgttccgggcactgacctgaaatccccggtgggggagtaggcagggagcctgcgatccggctctttgaagt

SEQ ID NO: 193174 - DNA, 70 bp, Homo sapiens
cgggcactgacctgaaatccccggtgggggagtaggcagggagcctgcgatccggctctttgaagttttc

SEQ ID NO: 193175 - DNA, 67 bp, Homo sapiens
aaatccccggtgggggagtaggcagggagcctgcgatccggctctttgaagttttcccccaagcgga

SEQ ID NO: 193176 - DNA, 72 bp, Homo sapiens
tgggggagtaggcagggagcctgcgatccggctctttgaagttttcccccaagcggactcgaggcggcgaga

SEQ ID NO: 193177 - DNA, 72 bp, Homo sapiens
agtaggcagggagcctgcgatccggctctttgaagttttcccccaagcggactcgaggcggcgagaaggagc

SEQ ID NO: 193178 - DNA, 69 bp, Homo sapiens
tgcgatccggctctttgaagttttcccccaagcggactcgaggcggcgagaaggagcggggggcggttg

SEQ ID NO: 193179 - DNA, 65 bp, Homo sapiens
ctctttgaagttttcccccaagcggactcgaggcggcgagaaggagcggggggcggttgggtggg

SEQ ID NO: 193180 - DNA, 66 bp, Homo sapiens
aagttttcccccaagcggactcgaggcggcgagaaggagcggggggcggttgggtgggtggagaga

SEQ ID NO: 193181 - DNA, 69 bp, Homo sapiens
aagcggactcgaggcggcgagaaggagcggggggcggttgggtgggtggagagagatatgaggggtggg

SEQ ID NO: 193182 - DNA, 67 bp, Homo sapiens
actcgaggcggcgagaaggagcggggggcggttgggtgggtggagagagatatgaggggtggggggg

SEQ ID NO: 193183 - DNA, 65 bp, Homo sapiens
aaggagcggggggcggttgggtgggtggagagagatatgaggggtggggggggttggcgacgtta

SEQ ID NO: 193184 - DNA, 67 bp, Homo sapiens
gggcggttgggtgggtggagagagatatgaggggtggggggggttggcgacgttaacgagcggagaa

SEQ ID NO: 193185 - DNA, 68 bp, Homo sapiens
ttgggtgggtggagagagatatgaggggtggggggggttggcgacgttaacgagcggagaaggagccg

SEQ ID NO: 193186 - DNA, 67 bp, Homo sapiens
aggggtggggggggttggcgacgttaacgagcggagaaggagccgggccggagaagcgcggcgagca

SEQ ID NO: 193187 - DNA, 71 bp, Homo sapiens
gggttggcgacgttaacgagcggagaaggagccgggccggagaagcgcggcgagcagcaaagtttgcggtc

SEQ ID NO: 193188 - DNA, 71 bp, Homo sapiens
acgttaacgagcggagaaggagccgggccggagaagcgcggcgagcagcaaagtttgcggtccccggctgc

SEQ ID NO: 193189 - DNA, 73 bp, Homo sapiens
acgagcggagaaggagccgggccggagaagcgcggcgagcagcaaagtttgcggtccccggctgcccgcagcc

SEQ ID NO: 193190 - DNA, 73 bp, Homo sapiens
aaggagccgggccggagaagcgcggcgagcagcaaagtttgcggtccccggctgcccgcagcccgctcgcggc

SEQ ID NO: 193191 - DNA, 77 bp, Homo sapiens
agaagcgcggcgagcagcaaagtttgcggtccccggctgcccgcagcccgctcgcggcgccgcgctcactcgactcc

SEQ ID NO: 193192 - DNA, 76 bp, Homo sapiens
cgagcagcaaagtttgcggtccccggctgcccgcagcccgctcgcggcgccgcgctcactcgactccctcgccgtc

SEQ ID NO: 193193 - DNA, 79 bp, Homo sapiens
tccccggctgcccgcagcccgctcgcggcgccgcgctcactcgactccctcgccgtctgctggcagccggctgccctcg

SEQ ID NO: 193194 - DNA, 78 bp, Homo sapiens
ctgcccgcagcccgctcgcggcgccgcgctcactcgactccctcgccgtctgctggcagccggctgccctcggggtcg

SEQ ID NO: 193195 - DNA, 66 bp, Homo sapiens
ccaccccctaccttccgggtaggagaactcaaaacaactcgctgaccttcgggccgaccagctccg

SEQ ID NO: 193196 - DNA, 70 bp, Homo sapiens
ctaccttccgggtaggagaactcaaaacaactcgctgaccttcgggccgaccagctccgtcttccactga

SEQ ID NO: 193197 - DNA, 75 bp, Homo sapiens
taggagaactcaaaacaactcgctgaccttcgggccgaccagctccgtcttccactgactccagcattccgttca

SEQ ID NO: 193198 - DNA, 72 bp, Homo sapiens
actcaaaacaactcgctgaccttcgggccgaccagctccgtcttccactgactccagcattccgttcaaacc

SEQ ID NO: 193199 - DNA, 74 bp, Homo sapiens
ttcgggccgaccagctccgtcttccactgactccagcattccgttcaaacccagcagccacggcttctaagatt

SEQ ID NO: 193200 - DNA, 76 bp, Homo sapiens
agctccgtcttccactgactccagcattccgttcaaacccagcagccacggcttctaagatttcactccgctctgg

SEQ ID NO: 193201 - DNA, 76 bp, Homo sapiens
gtcttccactgactccagcattccgttcaaacccagcagccacggcttctaagatttcactccgctctgggctggg

SEQ ID NO: 193202 - DNA, 71 bp, Homo sapiens
ttcaaacccagcagccacggcttctaagatttcactccgctctgggctgggggggagggggcgagttctcc

SEQ ID NO: 193203 - DNA, 70 bp, Homo sapiens
acccagcagccacggcttctaagatttcactccgctctgggctgggggggagggggcgagttctccggga

SEQ ID NO: 193204 - DNA, 69 bp, Homo sapiens
cttctaagatttcactccgctctgggctgggggggagggggcgagttctccgggagggggtgtctcaga

SEQ ID NO: 193205 - DNA, 69 bp, Homo sapiens
aagatttcactccgctctgggctgggggggagggggcgagttctccgggagggggtgtctcagatcgaa

SEQ ID NO: 193206 - DNA, 71 bp, Homo sapiens
tctgggctgggggggagggggcgagttctccgggagggggtgtctcagatcgaaagagccacttcacgctc

SEQ ID NO: 193207 - DNA, 70 bp, Homo sapiens
gggggagggggcgagttctccgggagggggtgtctcagatcgaaagagccacttcacgctctttctcctc

SEQ ID NO: 193208 - DNA, 73 bp, Homo sapiens
gcgagttctccgggagggggtgtctcagatcgaaagagccacttcacgctctttctcctcctccgaggtgagt

SEQ ID NO: 193209 - DNA, 72 bp, Homo sapiens
tccgggagggggtgtctcagatcgaaagagccacttcacgctctttctcctcctccgaggtgagtttttaga

SEQ ID NO: 193210 - DNA, 74 bp, Homo sapiens
tgtctcagatcgaaagagccacttcacgctctttctcctcctccgaggtgagtttttagactatttggaggcct

SEQ ID NO: 193211 - DNA, 71 bp, Homo sapiens
agatcgaaagagccacttcacgctctttctcctcctccgaggtgagtttttagactatttggaggccttgg

SEQ ID NO: 193212 - DNA, 71 bp, Homo sapiens
ctttctcctcctccgaggtgagtttttagactatttggaggccttggggaaacgcgagcagccgcgtgcaa

SEQ ID NO: 193213 - DNA, 72 bp, Homo sapiens
tcctcctccgaggtgagtttttagactatttggaggccttggggaaacgcgagcagccgcgtgcaaaggagc

SEQ ID NO: 193214 - DNA, 68 bp, Homo sapiens
aggtgagtttttagactatttggaggccttggggaaacgcgagcagccgcgtgcaaaggagccccccc

SEQ ID NO: 193215 - DNA, 69 bp, Homo sapiens
ttagactatttggaggccttggggaaacgcgagcagccgcgtgcaaaggagcccccccgccttctcccc

SEQ ID NO: 193216 - DNA, 74 bp, Homo sapiens
ggccttggggaaacgcgagcagccgcgtgcaaaggagcccccccgccttctccccgcacatgcagccttgtcta

SEQ ID NO: 193217 - DNA, 75 bp, Homo sapiens
agcagccgcgtgcaaaggagcccccccgccttctccccgcacatgcagccttgtctagtgtgacccgatttccag

SEQ ID NO: 193218 - DNA, 78 bp, Homo sapiens
cccgccttctccccgcacatgcagccttgtctagtgtgacccgatttccagggtcagcagcagagggcctggccagct

SEQ ID NO: 193219 - DNA, 80 bp, Homo sapiens
tctccccgcacatgcagccttgtctagtgtgacccgatttccagggtcagcagcagagggcctggccagcttcggaaata

SEQ ID NO: 193220 - DNA, 78 bp, Homo sapiens
acatgcagccttgtctagtgtgacccgatttccagggtcagcagcagagggcctggccagcttcggaaataccaccaa

SEQ ID NO: 193221 - DNA, 76 bp, Homo sapiens
ttgtctagtgtgacccgatttccagggtcagcagcagagggcctggccagcttcggaaataccaccaagcggtgga

SEQ ID NO: 193222 - DNA, 75 bp, Homo sapiens
acccgatttccagggtcagcagcagagggcctggccagcttcggaaataccaccaagcggtggactgtggcacca

SEQ ID NO: 193223 - DNA, 79 bp, Homo sapiens
ttccagggtcagcagcagagggcctggccagcttcggaaataccaccaagcggtggactgtggcaccaggcagagctgg

SEQ ID NO: 193224 - DNA, 67 bp, Homo sapiens
agccgggcggggagggggggtcacggcggcggcgtggggttcgctgtgtgacacaattacaacaact

SEQ ID NO: 193225 - DNA, 71 bp, Homo sapiens
ggagggggggtcacggcggcggcgtggggttcgctgtgtgacacaattacaacaactttgtgctggtgccg

SEQ ID NO: 193226 - DNA, 73 bp, Homo sapiens
tcacggcggcggcgtggggttcgctgtgtgacacaattacaacaactttgtgctggtgccggggaagtttgtg

SEQ ID NO: 193227 - DNA, 73 bp, Homo sapiens
gcgtggggttcgctgtgtgacacaattacaacaactttgtgctggtgccggggaagtttgtgtctccaacgaa

SEQ ID NO: 193228 - DNA, 72 bp, Homo sapiens
gggttcgctgtgtgacacaattacaacaactttgtgctggtgccggggaagtttgtgtctccaacgaatccc

SEQ ID NO: 193229 - DNA, 74 bp, Homo sapiens
tgtgacacaattacaacaactttgtgctggtgccggggaagtttgtgtctccaacgaatcccctcagtgctccc

SEQ ID NO: 193230 - DNA, 71 bp, Homo sapiens
ttacaacaactttgtgctggtgccggggaagtttgtgtctccaacgaatcccctcagtgctccccagcccc

SEQ ID NO: 193231 - DNA, 73 bp, Homo sapiens
tttgtgctggtgccggggaagtttgtgtctccaacgaatcccctcagtgctccccagccccgcgcgctccggc

SEQ ID NO: 193232 - DNA, 69 bp, Homo sapiens
gggaagtttgtgtctccaacgaatcccctcagtgctccccagccccgcgcgctccggccgttcccgccg

SEQ ID NO: 193233 - DNA, 69 bp, Homo sapiens
gtttgtgtctccaacgaatcccctcagtgctccccagccccgcgcgctccggccgttcccgccgtcccc

SEQ ID NO: 193234 - DNA, 70 bp, Homo sapiens
aacgaatcccctcagtgctccccagccccgcgcgctccggccgttcccgccgtccccgcctgtggctgcc

SEQ ID NO: 193235 - DNA, 71 bp, Homo sapiens
tcagtgctccccagccccgcgcgctccggccgttcccgccgtccccgcctgtggctgccccctgcccaacc

SEQ ID NO: 193236 - DNA, 70 bp, Homo sapiens
agccccgcgcgctccggccgttcccgccgtccccgcctgtggctgccccctgcccaaccccgcgatgtga

SEQ ID NO: 193237 - DNA, 70 bp, Homo sapiens
cgcgctccggccgttcccgccgtccccgcctgtggctgccccctgcccaaccccgcgatgtgaccctaca

SEQ ID NO: 193238 - DNA, 69 bp, Homo sapiens
ggccgttcccgccgtccccgcctgtggctgccccctgcccaaccccgcgatgtgaccctacagccgaaa

SEQ ID NO: 193239 - DNA, 72 bp, Homo sapiens
ccgtccccgcctgtggctgccccctgcccaaccccgcgatgtgaccctacagccgaaagccgccgctgccga

SEQ ID NO: 193240 - DNA, 70 bp, Homo sapiens
cctgtggctgccccctgcccaaccccgcgatgtgaccctacagccgaaagccgccgctgccgacccgggg

SEQ ID NO: 193241 - DNA, 70 bp, Homo sapiens
ccctgcccaaccccgcgatgtgaccctacagccgaaagccgccgctgccgacccgggggctccgcagccc

SEQ ID NO: 193242 - DNA, 72 bp, Homo sapiens
cccgcgatgtgaccctacagccgaaagccgccgctgccgacccgggggctccgcagcccctgccgccgccgc

SEQ ID NO: 193243 - DNA, 68 bp, Homo sapiens
cgccgccgccgccttcaccgccgccgcgttgggatttttcgtcgccgccgcccgcggcggaggaggag

SEQ ID NO: 193244 - DNA, 70 bp, Homo sapiens
cgccgcgttgggatttttcgtcgccgccgcccgcggcggaggaggaggcggcgataaagttggtgtgctg

SEQ ID NO: 193245 - DNA, 73 bp, Homo sapiens
tttcgtcgccgccgcccgcggcggaggaggaggcggcgataaagttggtgtgctggtcccgcgcgcagattgg

SEQ ID NO: 193246 - DNA, 73 bp, Homo sapiens
cccgcggcggaggaggaggcggcgataaagttggtgtgctggtcccgcgcgcagattgggggcgtcactgcgg

SEQ ID NO: 193247 - DNA, 72 bp, Homo sapiens
aggaggaggcggcgataaagttggtgtgctggtcccgcgcgcagattgggggcgtcactgcgggccccggtc

SEQ ID NO: 193248 - DNA, 71 bp, Homo sapiens
aggcggcgataaagttggtgtgctggtcccgcgcgcagattgggggcgtcactgcgggccccggtccgagg

SEQ ID NO: 193249 - DNA, 68 bp, Homo sapiens
aaagttggtgtgctggtcccgcgcgcagattgggggcgtcactgcgggccccggtccgagggggggtg

SEQ ID NO: 193250 - DNA, 68 bp, Homo sapiens
gtcccgcgcgcagattgggggcgtcactgcgggccccggtccgagggggggtgtcggcgttggagttg

SEQ ID NO: 193251 - DNA, 70 bp, Homo sapiens
cagattgggggcgtcactgcgggccccggtccgagggggggtgtcggcgttggagttgtgaattcgctgc

SEQ ID NO: 193252 - DNA, 71 bp, Homo sapiens
gcgtcactgcgggccccggtccgagggggggtgtcggcgttggagttgtgaattcgctgcgtttccatgaa

SEQ ID NO: 193253 - DNA, 75 bp, Homo sapiens
tccgagggggggtgtcggcgttggagttgtgaattcgctgcgtttccatgaaatcctgcggagtgtcgctcgcta

SEQ ID NO: 193254 - DNA, 76 bp, Homo sapiens
gggtgtcggcgttggagttgtgaattcgctgcgtttccatgaaatcctgcggagtgtcgctcgctaccgccgccgc

SEQ ID NO: 193255 - DNA, 78 bp, Homo sapiens
ggcgttggagttgtgaattcgctgcgtttccatgaaatcctgcggagtgtcgctcgctaccgccgccgctgccgccgc

SEQ ID NO: 193256 - DNA, 80 bp, Homo sapiens
tgaattcgctgcgtttccatgaaatcctgcggagtgtcgctcgctaccgccgccgctgccgccgccgctttcggtgatga

SEQ ID NO: 193257 - DNA, 76 bp, Homo sapiens
gtttccatgaaatcctgcggagtgtcgctcgctaccgccgccgctgccgccgccgctttcggtgatgaggaaaaga

SEQ ID NO: 193258 - DNA, 75 bp, Homo sapiens
atgaaatcctgcggagtgtcgctcgctaccgccgccgctgccgccgccgctttcggtgatgaggaaaagaaaatg

SEQ ID NO: 193259 - DNA, 72 bp, Homo sapiens
agtgtcgctcgctaccgccgccgctgccgccgccgctttcggtgatgaggaaaagaaaatggcggcgggaaa

SEQ ID NO: 193260 - DNA, 73 bp, Homo sapiens
ccgctgccgccgccgctttcggtgatgaggaaaagaaaatggcggcgggaaaagcgagcggcgagagcgagga

SEQ ID NO: 193261 - DNA, 72 bp, Homo sapiens
aaaatggcggcgggaaaagcgagcggcgagagcgaggaggcgtcccccagcctgacagccgaggagagggag

SEQ ID NO: 193262 - DNA, 75 bp, Homo sapiens
aaaagcgagcggcgagagcgaggaggcgtcccccagcctgacagccgaggagagggaggcgctcggcggactgga

SEQ ID NO: 193263 - DNA, 75 bp, Homo sapiens
agcggcgagagcgaggaggcgtcccccagcctgacagccgaggagagggaggcgctcggcggactggacaggtac

SEQ ID NO: 193264 - DNA, 73 bp, Homo sapiens
ggaggcgtcccccagcctgacagccgaggagagggaggcgctcggcggactggacaggtacgggccgccgtca

SEQ ID NO: 193265 - DNA, 72 bp, Homo sapiens
cccagcctgacagccgaggagagggaggcgctcggcggactggacaggtacgggccgccgtcactcgcccgg

SEQ ID NO: 193266 - DNA, 72 bp, Homo sapiens
tcgggcagggacgggtcggtggcgttccctgagcgttaacgagtaaactgtgtctgtctccacagccgcctc

SEQ ID NO: 193267 - DNA, 69 bp, Homo sapiens
acgggtcggtggcgttccctgagcgttaacgagtaaactgtgtctgtctccacagccgcctctttgggt

SEQ ID NO: 193268 - DNA, 75 bp, Homo sapiens
gcgttccctgagcgttaacgagtaaactgtgtctgtctccacagccgcctctttgggttcgtgagatttcatgaa

SEQ ID NO: 193269 - DNA, 76 bp, Homo sapiens
ccctgagcgttaacgagtaaactgtgtctgtctccacagccgcctctttgggttcgtgagatttcatgaagatggc

SEQ ID NO: 193270 - DNA, 77 bp, Homo sapiens
taacgagtaaactgtgtctgtctccacagccgcctctttgggttcgtgagatttcatgaagatggcgccaggacgaa

SEQ ID NO: 193271 - DNA, 77 bp, Homo sapiens
gtctgtctccacagccgcctctttgggttcgtgagatttcatgaagatggcgccaggacgaaggccctactgggcaa

SEQ ID NO: 193272 - DNA, 73 bp, Homo sapiens
acagccgcctctttgggttcgtgagatttcatgaagatggcgccaggacgaaggccctactgggcaaggtaag

SEQ ID NO: 193273 - DNA, 77 bp, Homo sapiens
tctttgggttcgtgagatttcatgaagatggcgccaggacgaaggccctactgggcaaggtaaggcagctgcgagtc

SEQ ID NO: 193274 - DNA, 79 bp, Homo sapiens
ttcgtgagatttcatgaagatggcgccaggacgaaggccctactgggcaaggtaaggcagctgcgagtcggagcgcgga

SEQ ID NO: 193275 - DNA, 76 bp, Homo sapiens
atttcatgaagatggcgccaggacgaaggccctactgggcaaggtaaggcagctgcgagtcggagcgcggacaccg

SEQ ID NO: 193276 - DNA, 75 bp, Homo sapiens
atggcgccaggacgaaggccctactgggcaaggtaaggcagctgcgagtcggagcgcggacaccgtctccctggc

SEQ ID NO: 193277 - DNA, 73 bp, Homo sapiens
ggacgaaggccctactgggcaaggtaaggcagctgcgagtcggagcgcggacaccgtctccctggccggcgcc

SEQ ID NO: 193278 - DNA, 72 bp, Homo sapiens
tttgtatttttttatttctaggctgttcgctgctatgaatctctaatcttaaaagctgaaggaaaagtggag

SEQ ID NO: 193279 - DNA, 74 bp, Homo sapiens
tttatttctaggctgttcgctgctatgaatctctaatcttaaaagctgaaggaaaagtggagtctgatttcttt

SEQ ID NO: 193280 - DNA, 76 bp, Homo sapiens
ttctaggctgttcgctgctatgaatctctaatcttaaaagctgaaggaaaagtggagtctgatttcttttgtcaat

SEQ ID NO: 193281 - DNA, 75 bp, Homo sapiens
tgctatgaatctctaatcttaaaagctgaaggaaaagtggagtctgatttcttttgtcaattaggtcacttcaac

SEQ ID NO: 193282 - DNA, 71 bp, Homo sapiens
aatctctaatcttaaaagctgaaggaaaagtggagtctgatttcttttgtcaattaggtcacttcaacctc

SEQ ID NO: 193283 - DNA, 70 bp, Homo sapiens
aaaagctgaaggaaaagtggagtctgatttcttttgtcaattaggtcacttcaacctcttattggaagat

SEQ ID NO: 193284 - DNA, 70 bp, Homo sapiens
ggaaaagtggagtctgatttcttttgtcaattaggtcacttcaacctcttattggaagattatccaaaag

SEQ ID NO: 193285 - DNA, 70 bp, Homo sapiens
agtggagtctgatttcttttgtcaattaggtcacttcaacctcttattggaagattatccaaaaggtaat

SEQ ID NO: 193286 - DNA, 67 bp, Homo sapiens
gatttcttttgtcaattaggtcacttcaacctcttattggaagattatccaaaaggtaatttttttc

SEQ ID NO: 193287 - DNA, 68 bp, Homo sapiens
gtcaattaggtcacttcaacctcttattggaagattatccaaaaggtaatttttttcttgttcattat

SEQ ID NO: 193288 - DNA, 69 bp, Homo sapiens
tcacttcaacctcttattggaagattatccaaaaggtaatttttttcttgttcattattgtttgattta

SEQ ID NO: 193289 - DNA, 70 bp, Homo sapiens
gttaccgtgtttgttaagtgtattattgactttaaagtgagacataattatgactcataattattttcct

SEQ ID NO: 193290 - DNA, 79 bp, Homo sapiens
taagtgtattattgactttaaagtgagacataattatgactcataattattttcctttcagcattatctgcataccaga

SEQ ID NO: 193291 - DNA, 79 bp, Homo sapiens
tattgactttaaagtgagacataattatgactcataattattttcctttcagcattatctgcataccagaggtactaca

SEQ ID NO: 193292 - DNA, 78 bp, Homo sapiens
aagtgagacataattatgactcataattattttcctttcagcattatctgcataccagaggtactacagtttacagtc

SEQ ID NO: 193293 - DNA, 78 bp, Homo sapiens
ataattatgactcataattattttcctttcagcattatctgcataccagaggtactacagtttacagtctgactactg

SEQ ID NO: 193294 - DNA, 76 bp, Homo sapiens
tcataattattttcctttcagcattatctgcataccagaggtactacagtttacagtctgactactggaaggttag

SEQ ID NO: 193295 - DNA, 75 bp, Homo sapiens
ttttcctttcagcattatctgcataccagaggtactacagtttacagtctgactactggaaggttagtgtacatt

SEQ ID NO: 193296 - DNA, 81 bp, Homo sapiens
tttcagcattatctgcataccagaggtactacagtttacagtctgactactggaaggttagtgtacatttgcatgctgatt

SEQ ID NO: 193297 - DNA, 80 bp, Homo sapiens
atctgcataccagaggtactacagtttacagtctgactactggaaggttagtgtacatttgcatgctgatttcatgtttg

SEQ ID NO: 193298 - DNA, 76 bp, Homo sapiens
agaggtactacagtttacagtctgactactggaaggttagtgtacatttgcatgctgatttcatgtttgtgttttg

SEQ ID NO: 193299 - DNA, 77 bp, Homo sapiens
acagtttacagtctgactactggaaggttagtgtacatttgcatgctgatttcatgtttgtgttttgggcagattat

SEQ ID NO: 193300 - DNA, 69 bp, Homo sapiens
caataataacatcatatatgttagatacaagtatttttcctaaaaatctttttcccttcctttacagaa

SEQ ID NO: 193301 - DNA, 71 bp, Homo sapiens
taacatcatatatgttagatacaagtatttttcctaaaaatctttttcccttcctttacagaatgctgcct

SEQ ID NO: 193302 - DNA, 67 bp, Homo sapiens
gttagatacaagtatttttcctaaaaatctttttcccttcctttacagaatgctgcctttttatatg

SEQ ID NO: 193303 - DNA, 66 bp, Homo sapiens
caagtatttttcctaaaaatctttttcccttcctttacagaatgctgcctttttatatggtcttgg

SEQ ID NO: 193304 - DNA, 67 bp, Homo sapiens
ctaaaaatctttttcccttcctttacagaatgctgcctttttatatggtcttggtttggtctacttc

SEQ ID NO: 193305 - DNA, 71 bp, Homo sapiens
ttttcccttcctttacagaatgctgcctttttatatggtcttggtttggtctacttccattataatgcatt

SEQ ID NO: 193306 - DNA, 75 bp, Homo sapiens
tttacagaatgctgcctttttatatggtcttggtttggtctacttccattataatgcatttcagtggtaagttga

SEQ ID NO: 193307 - DNA, 75 bp, Homo sapiens
gaatgctgcctttttatatggtcttggtttggtctacttccattataatgcatttcagtggtaagttgacataaa

SEQ ID NO: 193308 - DNA, 74 bp, Homo sapiens
tatatggtcttggtttggtctacttccattataatgcatttcagtggtaagttgacataaaaccagtaattcag

SEQ ID NO: 193309 - DNA, 73 bp, Homo sapiens
ggtcttggtttggtctacttccattataatgcatttcagtggtaagttgacataaaaccagtaattcagtcat

SEQ ID NO: 193310 - DNA, 75 bp, Homo sapiens
gtctacttccattataatgcatttcagtggtaagttgacataaaaccagtaattcagtcattttcagtaaatggc

SEQ ID NO: 193311 - DNA, 75 bp, Homo sapiens
ccattataatgcatttcagtggtaagttgacataaaaccagtaattcagtcattttcagtaaatggcttgtttgc

SEQ ID NO: 193312 - DNA, 76 bp, Homo sapiens
ttcatgcacgtgttaaaaagttaagatatcttatgtctatattctttcagggcaattaaagcatttcaggaggtgc

SEQ ID NO: 193313 - DNA, 74 bp, Homo sapiens
aaaaagttaagatatcttatgtctatattctttcagggcaattaaagcatttcaggaggtgctttatgttgatc

SEQ ID NO: 193314 - DNA, 76 bp, Homo sapiens
ttaagatatcttatgtctatattctttcagggcaattaaagcatttcaggaggtgctttatgttgatcccagcttt

SEQ ID NO: 193315 - DNA, 77 bp, Homo sapiens
ttatgtctatattctttcagggcaattaaagcatttcaggaggtgctttatgttgatcccagcttttgtcgagccaa

SEQ ID NO: 193316 - DNA, 74 bp, Homo sapiens
tttcagggcaattaaagcatttcaggaggtgctttatgttgatcccagcttttgtcgagccaaggaaattcatt

SEQ ID NO: 193317 - DNA, 74 bp, Homo sapiens
ggcaattaaagcatttcaggaggtgctttatgttgatcccagcttttgtcgagccaaggaaattcatttacgac

SEQ ID NO: 193318 - DNA, 73 bp, Homo sapiens
tttcaggaggtgctttatgttgatcccagcttttgtcgagccaaggaaattcatttacgacttgggcttatgt

SEQ ID NO: 193319 - DNA, 72 bp, Homo sapiens
aggtgctttatgttgatcccagcttttgtcgagccaaggaaattcatttacgacttgggcttatgttcaaag

SEQ ID NO: 193320 - DNA, 75 bp, Homo sapiens
tgttgatcccagcttttgtcgagccaaggaaattcatttacgacttgggcttatgttcaaagtgaacacagacta

SEQ ID NO: 193321 - DNA, 74 bp, Homo sapiens
tttgtcgagccaaggaaattcatttacgacttgggcttatgttcaaagtgaacacagactatgagtctagttta

SEQ ID NO: 193322 - DNA, 71 bp, Homo sapiens
caaggaaattcatttacgacttgggcttatgttcaaagtgaacacagactatgagtctagtttaaaggtag

SEQ ID NO: 193323 - DNA, 70 bp, Homo sapiens
aaattcatttacgacttgggcttatgttcaaagtgaacacagactatgagtctagtttaaaggtaggttg

SEQ ID NO: 193324 - DNA, 67 bp, Homo sapiens
acttgggcttatgttcaaagtgaacacagactatgagtctagtttaaaggtaggttgttgggttttt

SEQ ID NO: 193325 - DNA, 70 bp, Homo sapiens
cttatgttcaaagtgaacacagactatgagtctagtttaaaggtaggttgttgggttttttcaagataca

SEQ ID NO: 193326 - DNA, 78 bp, Homo sapiens
aaaagtatcttaagatgcttttgtgtgactctaaattgactgcattaattttctcactctcgtcttgcagcattttca

SEQ ID NO: 193327 - DNA, 79 bp, Homo sapiens
ttaagatgcttttgtgtgactctaaattgactgcattaattttctcactctcgtcttgcagcattttcagttagctttg

SEQ ID NO: 193328 - DNA, 79 bp, Homo sapiens
ttgtgtgactctaaattgactgcattaattttctcactctcgtcttgcagcattttcagttagctttggttgactgtaa

SEQ ID NO: 193329 - DNA, 76 bp, Homo sapiens
actctaaattgactgcattaattttctcactctcgtcttgcagcattttcagttagctttggttgactgtaatccc

SEQ ID NO: 193330 - DNA, 74 bp, Homo sapiens
atccctgcactttgtccaatgctgaaagtaagtattattaagtactgtagttttctacatgtattccgatcact

SEQ ID NO: 193331 - DNA, 71 bp, Homo sapiens
gctttgttattcttacttaatttgccccaaattctgctgtattgttactgatttttttgtctttcctcatc

SEQ ID NO: 193332 - DNA, 73 bp, Homo sapiens
tcttacttaatttgccccaaattctgctgtattgttactgatttttttgtctttcctcatcctttgcagttca

SEQ ID NO: 193333 - DNA, 73 bp, Homo sapiens
atttgccccaaattctgctgtattgttactgatttttttgtctttcctcatcctttgcagttcaatttcacat

SEQ ID NO: 193334 - DNA, 77 bp, Homo sapiens
attctgctgtattgttactgatttttttgtctttcctcatcctttgcagttcaatttcacattgcccacttatatga

SEQ ID NO: 193335 - DNA, 75 bp, Homo sapiens
gctgtattgttactgatttttttgtctttcctcatcctttgcagttcaatttcacattgcccacttatatgaaac

SEQ ID NO: 193336 - DNA, 71 bp, Homo sapiens
atttttttgtctttcctcatcctttgcagttcaatttcacattgcccacttatatgaaacccaggtaagta

SEQ ID NO: 193337 - DNA, 71 bp, Homo sapiens
ctttcctcatcctttgcagttcaatttcacattgcccacttatatgaaacccaggtaagtattttaactta

SEQ ID NO: 193338 - DNA, 72 bp, Homo sapiens
ctcatcctttgcagttcaatttcacattgcccacttatatgaaacccaggtaagtattttaacttattctat

SEQ ID NO: 193339 - DNA, 70 bp, Homo sapiens
gcagttcaatttcacattgcccacttatatgaaacccaggtaagtattttaacttattctatttaaaaca

SEQ ID NO: 193340 - DNA, 68 bp, Homo sapiens
ttcacattgcccacttatatgaaacccaggtaagtattttaacttattctatttaaaacaaaagcaaa

SEQ ID NO: 193341 - DNA, 64 bp, Homo sapiens
ccacttatatgaaacccaggtaagtattttaacttattctatttaaaacaaaagcaaacaaaaa

SEQ ID NO: 193342 - DNA, 71 bp, Homo sapiens
gttccttaaagattatgttaatttttctccaaatctctttttctgttctttagaggaaatatcattctgca

SEQ ID NO: 193343 - DNA, 72 bp, Homo sapiens
atgttaatttttctccaaatctctttttctgttctttagaggaaatatcattctgcaaaagaagcttatgaa

SEQ ID NO: 193344 - DNA, 75 bp, Homo sapiens
ttctccaaatctctttttctgttctttagaggaaatatcattctgcaaaagaagcttatgaacaacttttgcaga

SEQ ID NO: 193345 - DNA, 75 bp, Homo sapiens
ctctttttctgttctttagaggaaatatcattctgcaaaagaagcttatgaacaacttttgcagacagagaatct

SEQ ID NO: 193346 - DNA, 79 bp, Homo sapiens
tgttctttagaggaaatatcattctgcaaaagaagcttatgaacaacttttgcagacagagaatctttctgcacaagta

SEQ ID NO: 193347 - DNA, 79 bp, Homo sapiens
ttagaggaaatatcattctgcaaaagaagcttatgaacaacttttgcagacagagaatctttctgcacaagtaaaagca

SEQ ID NO: 193348 - DNA, 77 bp, Homo sapiens
attctgcaaaagaagcttatgaacaacttttgcagacagagaatctttctgcacaagtaaaagcaactgtcttacaa

SEQ ID NO: 193349 - DNA, 75 bp, Homo sapiens
aaagaagcttatgaacaacttttgcagacagagaatctttctgcacaagtaaaagcaactgtcttacaacagtta

SEQ ID NO: 193350 - DNA, 76 bp, Homo sapiens
atgaacaacttttgcagacagagaatctttctgcacaagtaaaagcaactgtcttacaacagttaggtatgtaata

SEQ ID NO: 193351 - DNA, 76 bp, Homo sapiens
cttttgcagacagagaatctttctgcacaagtaaaagcaactgtcttacaacagttaggtatgtaatagtatacat

SEQ ID NO: 193352 - DNA, 75 bp, Homo sapiens
cagagaatctttctgcacaagtaaaagcaactgtcttacaacagttaggtatgtaatagtatacatttagtgtat

SEQ ID NO: 193353 - DNA, 75 bp, Homo sapiens
ctgcacaagtaaaagcaactgtcttacaacagttaggtatgtaatagtatacatttagtgtattataagtgcttc

SEQ ID NO: 193354 - DNA, 74 bp, Homo sapiens
gaacaattaagtcatttatgtaaatttttttaaatcatttactgtaggttggatgcatcacactgtagatctcc

SEQ ID NO: 193355 - DNA, 76 bp, Homo sapiens
tcatttatgtaaatttttttaaatcatttactgtaggttggatgcatcacactgtagatctcctgggagataaagc

SEQ ID NO: 193356 - DNA, 73 bp, Homo sapiens
aaatttttttaaatcatttactgtaggttggatgcatcacactgtagatctcctgggagataaagccaccaag

SEQ ID NO: 193357 - DNA, 79 bp, Homo sapiens
ttaaatcatttactgtaggttggatgcatcacactgtagatctcctgggagataaagccaccaaggaaagctatgctat

SEQ ID NO: 193358 - DNA, 80 bp, Homo sapiens
atttactgtaggttggatgcatcacactgtagatctcctgggagataaagccaccaaggaaagctatgctattcagtatc

SEQ ID NO: 193359 - DNA, 80 bp, Homo sapiens
ttggatgcatcacactgtagatctcctgggagataaagccaccaaggaaagctatgctattcagtatctccaaaagtcct

SEQ ID NO: 193360 - DNA, 77 bp, Homo sapiens
atcacactgtagatctcctgggagataaagccaccaaggaaagctatgctattcagtatctccaaaagtccttggaa

SEQ ID NO: 193361 - DNA, 76 bp, Homo sapiens
tcctgggagataaagccaccaaggaaagctatgctattcagtatctccaaaagtccttggaagcagatcctaattc

SEQ ID NO: 193362 - DNA, 76 bp, Homo sapiens
agataaagccaccaaggaaagctatgctattcagtatctccaaaagtccttggaagcagatcctaattctggccag

SEQ ID NO: 193363 - DNA, 75 bp, Homo sapiens
aaggaaagctatgctattcagtatctccaaaagtccttggaagcagatcctaattctggccagtcctggtatttc

SEQ ID NO: 193364 - DNA, 76 bp, Homo sapiens
agctatgctattcagtatctccaaaagtccttggaagcagatcctaattctggccagtcctggtatttcctcggaa

SEQ ID NO: 193365 - DNA, 74 bp, Homo sapiens
attcagtatctccaaaagtccttggaagcagatcctaattctggccagtcctggtatttcctcggaaggtgaga

SEQ ID NO: 193366 - DNA, 72 bp, Homo sapiens
aagtccttggaagcagatcctaattctggccagtcctggtatttcctcggaaggtgagacttaccagacatt

SEQ ID NO: 193367 - DNA, 73 bp, Homo sapiens
aagcagatcctaattctggccagtcctggtatttcctcggaaggtgagacttaccagacatttatgtttgatt

SEQ ID NO: 193368 - DNA, 72 bp, Homo sapiens
ttttttcccttcccttctcaggtgctattcaagtattgggaaagttcaggatgcctttatatcttacaggca

SEQ ID NO: 193369 - DNA, 76 bp, Homo sapiens
ttcccttctcaggtgctattcaagtattgggaaagttcaggatgcctttatatcttacaggcagtctattgataaa

SEQ ID NO: 193370 - DNA, 77 bp, Homo sapiens
aggtgctattcaagtattgggaaagttcaggatgcctttatatcttacaggcagtctattgataaatcagaagcaag

SEQ ID NO: 193371 - DNA, 81 bp, Homo sapiens
tattcaagtattgggaaagttcaggatgcctttatatcttacaggcagtctattgataaatcagaagcaagtgcagataca

SEQ ID NO: 193372 - DNA, 80 bp, Homo sapiens
aaagttcaggatgcctttatatcttacaggcagtctattgataaatcagaagcaagtgcagatacatggtgttcaatagg

SEQ ID NO: 193373 - DNA, 79 bp, Homo sapiens
atgcctttatatcttacaggcagtctattgataaatcagaagcaagtgcagatacatggtgttcaatagggtaagcctt

SEQ ID NO: 193374 - DNA, 80 bp, Homo sapiens
tttatatcttacaggcagtctattgataaatcagaagcaagtgcagatacatggtgttcaatagggtaagcctttgtata

SEQ ID NO: 193375 - DNA, 77 bp, Homo sapiens
cagtctattgataaatcagaagcaagtgcagatacatggtgttcaatagggtaagcctttgtataaaaatagtagta

SEQ ID NO: 193376 - DNA, 75 bp, Homo sapiens
tgataaatcagaagcaagtgcagatacatggtgttcaatagggtaagcctttgtataaaaatagtagtaatttaa

SEQ ID NO: 193377 - DNA, 77 bp, Homo sapiens
aagcagttcttctgagttgacttattttttcttaatttctctttccagtgtgctatatcagcagcaaaatcagccca

SEQ ID NO: 193378 - DNA, 79 bp, Homo sapiens
tcttctgagttgacttattttttcttaatttctctttccagtgtgctatatcagcagcaaaatcagcccatggatgctt

SEQ ID NO: 193379 - DNA, 78 bp, Homo sapiens
tattttttcttaatttctctttccagtgtgctatatcagcagcaaaatcagcccatggatgctttacaggcctatatt

SEQ ID NO: 193380 - DNA, 82 bp, Homo sapiens
ttaatttctctttccagtgtgctatatcagcagcaaaatcagcccatggatgctttacaggcctatatttgtgctgtacaat

SEQ ID NO: 193381 - DNA, 84 bp, Homo sapiens
ctctttccagtgtgctatatcagcagcaaaatcagcccatggatgctttacaggcctatatttgtgctgtacaattggaccatg

SEQ ID NO: 193382 - DNA, 89 bp, Homo sapiens
gtgtgctatatcagcagcaaaatcagcccatggatgctttacaggcctatatttgtgctgtacaattggaccatggccatgctgcagcc

SEQ ID NO: 193383 - DNA, 84 bp, Homo sapiens
agcaaaatcagcccatggatgctttacaggcctatatttgtgctgtacaattggaccatggccatgctgcagcctggatggacc

SEQ ID NO: 193384 - DNA, 85 bp, Homo sapiens
aatcagcccatggatgctttacaggcctatatttgtgctgtacaattggaccatggccatgctgcagcctggatggacctaggca

SEQ ID NO: 193385 - DNA, 84 bp, Homo sapiens
gctttacaggcctatatttgtgctgtacaattggaccatggccatgctgcagcctggatggacctaggcactctctatgaatcc

SEQ ID NO: 193386 - DNA, 85 bp, Homo sapiens
aggcctatatttgtgctgtacaattggaccatggccatgctgcagcctggatggacctaggcactctctatgaatcctgcaacca

SEQ ID NO: 193387 - DNA, 86 bp, Homo sapiens
atttgtgctgtacaattggaccatggccatgctgcagcctggatggacctaggcactctctatgaatcctgcaaccagcctcagga

SEQ ID NO: 193388 - DNA, 86 bp, Homo sapiens
tacaattggaccatggccatgctgcagcctggatggacctaggcactctctatgaatcctgcaaccagcctcaggatgccattaaa

SEQ ID NO: 193389 - DNA, 85 bp, Homo sapiens
atggccatgctgcagcctggatggacctaggcactctctatgaatcctgcaaccagcctcaggatgccattaaatgctacttaaa

SEQ ID NO: 193390 - DNA, 82 bp, Homo sapiens
agcctggatggacctaggcactctctatgaatcctgcaaccagcctcaggatgccattaaatgctacttaaatgcaactaga

SEQ ID NO: 193391 - DNA, 81 bp, Homo sapiens
atggacctaggcactctctatgaatcctgcaaccagcctcaggatgccattaaatgctacttaaatgcaactagaagcaaa

SEQ ID NO: 193392 - DNA, 79 bp, Homo sapiens
actctctatgaatcctgcaaccagcctcaggatgccattaaatgctacttaaatgcaactagaagcaaaagttgtagta

SEQ ID NO: 193393 - DNA, 78 bp, Homo sapiens
tatgaatcctgcaaccagcctcaggatgccattaaatgctacttaaatgcaactagaagcaaaagttgtagtaatacc

SEQ ID NO: 193394 - DNA, 78 bp, Homo sapiens
aaccagcctcaggatgccattaaatgctacttaaatgcaactagaagcaaaagttgtagtaatacctctgcacttgca

SEQ ID NO: 193395 - DNA, 77 bp, Homo sapiens
atgccattaaatgctacttaaatgcaactagaagcaaaagttgtagtaatacctctgcacttgcagcacgaattaag

SEQ ID NO: 193396 - DNA, 76 bp, Homo sapiens
aatgctacttaaatgcaactagaagcaaaagttgtagtaatacctctgcacttgcagcacgaattaagtatttaca

SEQ ID NO: 193397 - DNA, 74 bp, Homo sapiens
acttaaatgcaactagaagcaaaagttgtagtaatacctctgcacttgcagcacgaattaagtatttacaggta

SEQ ID NO: 193398 - DNA, 69 bp, Homo sapiens
acctctgcacttgcagcacgaattaagtatttacaggtaaaatttttaaatggcagttttttaaagcca

SEQ ID NO: 193399 - DNA, 70 bp, Homo sapiens
ctcaagtaggcttgtgttaaatttgctttttacataatttttcctaggctcagttgtgtaaccttccaca

SEQ ID NO: 193400 - DNA, 69 bp, Homo sapiens
gcttgtgttaaatttgctttttacataatttttcctaggctcagttgtgtaaccttccacaaggtagtc

SEQ ID NO: 193401 - DNA, 69 bp, Homo sapiens
tttgctttttacataatttttcctaggctcagttgtgtaaccttccacaaggtagtctacagaataaaa

SEQ ID NO: 193402 - DNA, 68 bp, Homo sapiens
acataatttttcctaggctcagttgtgtaaccttccacaaggtagtctacagaataaaactaaattac

SEQ ID NO: 193403 - DNA, 69 bp, Homo sapiens
ttcctaggctcagttgtgtaaccttccacaaggtagtctacagaataaaactaaattacttcctagtat

SEQ ID NO: 193404 - DNA, 68 bp, Homo sapiens
agttgtgtaaccttccacaaggtagtctacagaataaaactaaattacttcctagtattgaggaggcg

SEQ ID NO: 193405 - DNA, 70 bp, Homo sapiens
taaccttccacaaggtagtctacagaataaaactaaattacttcctagtattgaggaggcgtggagccta

SEQ ID NO: 193406 - DNA, 69 bp, Homo sapiens
acaaggtagtctacagaataaaactaaattacttcctagtattgaggaggcgtggagcctaccaattcc

SEQ ID NO: 193407 - DNA, 70 bp, Homo sapiens
agaataaaactaaattacttcctagtattgaggaggcgtggagcctaccaattcccgcagagcttacctc

SEQ ID NO: 193408 - DNA, 71 bp, Homo sapiens
aaaactaaattacttcctagtattgaggaggcgtggagcctaccaattcccgcagagcttacctccaggca

SEQ ID NO: 193409 - DNA, 77 bp, Homo sapiens
tacttcctagtattgaggaggcgtggagcctaccaattcccgcagagcttacctccaggcagggtgccatgaacaca

SEQ ID NO: 193410 - DNA, 82 bp, Homo sapiens
tattgaggaggcgtggagcctaccaattcccgcagagcttacctccaggcagggtgccatgaacacagcacagcaggtgaga

SEQ ID NO: 193411 - DNA, 79 bp, Homo sapiens
tggagcctaccaattcccgcagagcttacctccaggcagggtgccatgaacacagcacagcaggtgagaagttgggtta

SEQ ID NO: 193412 - DNA, 81 bp, Homo sapiens
taccaattcccgcagagcttacctccaggcagggtgccatgaacacagcacagcaggtgagaagttgggttatgttctgca

SEQ ID NO: 193413 - DNA, 80 bp, Homo sapiens
agcttacctccaggcagggtgccatgaacacagcacagcaggtgagaagttgggttatgttctgcaggtgcccagcttta

SEQ ID NO: 193414 - DNA, 75 bp, Homo sapiens
aagaatatatagaaccctatttttgtcttccttctgtgattcttaggcatgtaaacctcatcatccaaatactga

SEQ ID NO: 193415 - DNA, 75 bp, Homo sapiens
tatatagaaccctatttttgtcttccttctgtgattcttaggcatgtaaacctcatcatccaaatactgaacctg

SEQ ID NO: 193416 - DNA, 77 bp, Homo sapiens
ttttgtcttccttctgtgattcttaggcatgtaaacctcatcatccaaatactgaacctgtattaggcctcagtcaa

SEQ ID NO: 193417 - DNA, 76 bp, Homo sapiens
cttctgtgattcttaggcatgtaaacctcatcatccaaatactgaacctgtattaggcctcagtcaaacaccaatt

SEQ ID NO: 193418 - DNA, 77 bp, Homo sapiens
attcttaggcatgtaaacctcatcatccaaatactgaacctgtattaggcctcagtcaaacaccaatttcacagcaa

SEQ ID NO: 193419 - DNA, 78 bp, Homo sapiens
tgtaaacctcatcatccaaatactgaacctgtattaggcctcagtcaaacaccaatttcacagcaatccttgccacta

SEQ ID NO: 193420 - DNA, 79 bp, Homo sapiens
tcatccaaatactgaacctgtattaggcctcagtcaaacaccaatttcacagcaatccttgccactacacatgattcct

SEQ ID NO: 193421 - DNA, 77 bp, Homo sapiens
aaatactgaacctgtattaggcctcagtcaaacaccaatttcacagcaatccttgccactacacatgattccttcta

SEQ ID NO: 193422 - DNA, 78 bp, Homo sapiens
acctgtattaggcctcagtcaaacaccaatttcacagcaatccttgccactacacatgattccttctagccaagtaga

SEQ ID NO: 193423 - DNA, 80 bp, Homo sapiens
ctcagtcaaacaccaatttcacagcaatccttgccactacacatgattccttctagccaagtagatgacctgtccagtcc

SEQ ID NO: 193424 - DNA, 79 bp, Homo sapiens
aaacaccaatttcacagcaatccttgccactacacatgattccttctagccaagtagatgacctgtccagtcctgccaa

SEQ ID NO: 193425 - DNA, 80 bp, Homo sapiens
ttcacagcaatccttgccactacacatgattccttctagccaagtagatgacctgtccagtcctgccaagaggaaaagaa

SEQ ID NO: 193426 - DNA, 79 bp, Homo sapiens
ttgccactacacatgattccttctagccaagtagatgacctgtccagtcctgccaagaggaaaagaacatctagtccaa

SEQ ID NO: 193427 - DNA, 75 bp, Homo sapiens
atgattccttctagccaagtagatgacctgtccagtcctgccaagaggaaaagaacatctagtccaacaaaggta

SEQ ID NO: 193428 - DNA, 75 bp, Homo sapiens
tctagccaagtagatgacctgtccagtcctgccaagaggaaaagaacatctagtccaacaaaggtatatgtttta

SEQ ID NO: 193429 - DNA, 73 bp, Homo sapiens
aagtagatgacctgtccagtcctgccaagaggaaaagaacatctagtccaacaaaggtatatgttttagagaa

SEQ ID NO: 193430 - DNA, 71 bp, Homo sapiens
acctgtccagtcctgccaagaggaaaagaacatctagtccaacaaaggtatatgttttagagaaatagaaa

SEQ ID NO: 193431 - DNA, 79 bp, Homo sapiens
ttttttaaatcgattttcctcagaatacttctgacaattggagtggtggacatgctgtgtcacatcctccagtacagca

SEQ ID NO: 193432 - DNA, 83 bp, Homo sapiens
taaatcgattttcctcagaatacttctgacaattggagtggtggacatgctgtgtcacatcctccagtacagcaacaagctca

SEQ ID NO: 193433 - DNA, 86 bp, Homo sapiens
tcagaatacttctgacaattggagtggtggacatgctgtgtcacatcctccagtacagcaacaagctcattcatggtgtttgacac

SEQ ID NO: 193434 - DNA, 86 bp, Homo sapiens
tacttctgacaattggagtggtggacatgctgtgtcacatcctccagtacagcaacaagctcattcatggtgtttgacaccacaga

SEQ ID NO: 193435 - DNA, 83 bp, Homo sapiens
aattggagtggtggacatgctgtgtcacatcctccagtacagcaacaagctcattcatggtgtttgacaccacagaaattaca

SEQ ID NO: 193436 - DNA, 83 bp, Homo sapiens
acatgctgtgtcacatcctccagtacagcaacaagctcattcatggtgtttgacaccacagaaattacaggtatgtaagatgt

SEQ ID NO: 193437 - DNA, 81 bp, Homo sapiens
tgtcacatcctccagtacagcaacaagctcattcatggtgtttgacaccacagaaattacaggtatgtaagatgtttttga

SEQ ID NO: 193438 - DNA, 76 bp, Homo sapiens
agtacagcaacaagctcattcatggtgtttgacaccacagaaattacaggtatgtaagatgtttttgacaaattgt

SEQ ID NO: 193439 - DNA, 75 bp, Homo sapiens
agcaacaagctcattcatggtgtttgacaccacagaaattacaggtatgtaagatgtttttgacaaattgtttat

SEQ ID NO: 193440 - DNA, 75 bp, Homo sapiens
tcctaaatatatctttgactatattctctttttgttcttcttctagcatttggaacagctccgcgcaaatagaaa

SEQ ID NO: 193441 - DNA, 74 bp, Homo sapiens
aatatatctttgactatattctctttttgttcttcttctagcatttggaacagctccgcgcaaatagaaataat

SEQ ID NO: 193442 - DNA, 76 bp, Homo sapiens
tatattctctttttgttcttcttctagcatttggaacagctccgcgcaaatagaaataatttaaatccagcacaga

SEQ ID NO: 193443 - DNA, 74 bp, Homo sapiens
ctttttgttcttcttctagcatttggaacagctccgcgcaaatagaaataatttaaatccagcacagaaactga

SEQ ID NO: 193444 - DNA, 79 bp, Homo sapiens
ttctagcatttggaacagctccgcgcaaatagaaataatttaaatccagcacagaaactgatgctggaacagctggaaa

SEQ ID NO: 193445 - DNA, 77 bp, Homo sapiens
atttggaacagctccgcgcaaatagaaataatttaaatccagcacagaaactgatgctggaacagctggaaagtcag

SEQ ID NO: 193446 - DNA, 76 bp, Homo sapiens
ctccgcgcaaatagaaataatttaaatccagcacagaaactgatgctggaacagctggaaagtcagtttgtcttaa

SEQ ID NO: 193447 - DNA, 77 bp, Homo sapiens
agaaataatttaaatccagcacagaaactgatgctggaacagctggaaagtcagtttgtcttaatgcaacaacacca

SEQ ID NO: 193448 - DNA, 79 bp, Homo sapiens
tttaaatccagcacagaaactgatgctggaacagctggaaagtcagtttgtcttaatgcaacaacaccaagtgtgtata

SEQ ID NO: 193449 - DNA, 78 bp, Homo sapiens
acagaaactgatgctggaacagctggaaagtcagtttgtcttaatgcaacaacaccaagtgtgtatagcatatttttc

SEQ ID NO: 193450 - DNA, 76 bp, Homo sapiens
atgctggaacagctggaaagtcagtttgtcttaatgcaacaacaccaagtgtgtatagcatatttttccctgaaat

SEQ ID NO: 193451 - DNA, 74 bp, Homo sapiens
acagctggaaagtcagtttgtcttaatgcaacaacaccaagtgtgtatagcatatttttccctgaaatttgtta

SEQ ID NO: 193452 - DNA, 74 bp, Homo sapiens
tatagattacacaaccagcatttacttttcctttgtttttttgacagatgagaccaacaggagttgcacaggta

SEQ ID NO: 193453 - DNA, 74 bp, Homo sapiens
tacacaaccagcatttacttttcctttgtttttttgacagatgagaccaacaggagttgcacaggtacgatcta

SEQ ID NO: 193454 - DNA, 71 bp, Homo sapiens
atttacttttcctttgtttttttgacagatgagaccaacaggagttgcacaggtacgatctactggaattc

SEQ ID NO: 193455 - DNA, 74 bp, Homo sapiens
ctttgtttttttgacagatgagaccaacaggagttgcacaggtacgatctactggaattcctaatgggccaaca

SEQ ID NO: 193456 - DNA, 80 bp, Homo sapiens
tttttgacagatgagaccaacaggagttgcacaggtacgatctactggaattcctaatgggccaacagctgactcatcac

SEQ ID NO: 193457 - DNA, 80 bp, Homo sapiens
atgagaccaacaggagttgcacaggtacgatctactggaattcctaatgggccaacagctgactcatcactgcctacaaa

SEQ ID NO: 193458 - DNA, 80 bp, Homo sapiens
acaggagttgcacaggtacgatctactggaattcctaatgggccaacagctgactcatcactgcctacaaactcagtctc

SEQ ID NO: 193459 - DNA, 82 bp, Homo sapiens
acaggtacgatctactggaattcctaatgggccaacagctgactcatcactgcctacaaactcagtctctggccagcagcca

SEQ ID NO: 193460 - DNA, 86 bp, Homo sapiens
atctactggaattcctaatgggccaacagctgactcatcactgcctacaaactcagtctctggccagcagccacagcttgctctga

SEQ ID NO: 193461 - DNA, 87 bp, Homo sapiens
ttcctaatgggccaacagctgactcatcactgcctacaaactcagtctctggccagcagccacagcttgctctgaccagagtgccta

SEQ ID NO: 193462 - DNA, 89 bp, Homo sapiens
aacagctgactcatcactgcctacaaactcagtctctggccagcagccacagcttgctctgaccagagtgcctagcgtctctcagcctg

SEQ ID NO: 193463 - DNA, 89 bp, Homo sapiens
tgactcatcactgcctacaaactcagtctctggccagcagccacagcttgctctgaccagagtgcctagcgtctctcagcctggagtcc

SEQ ID NO: 193464 - DNA, 86 bp, Homo sapiens
tacaaactcagtctctggccagcagccacagcttgctctgaccagagtgcctagcgtctctcagcctggagtccgtcctgcctgcc

SEQ ID NO: 193465 - DNA, 85 bp, Homo sapiens
actcagtctctggccagcagccacagcttgctctgaccagagtgcctagcgtctctcagcctggagtccgtcctgcctgccctgg

SEQ ID NO: 193466 - DNA, 84 bp, Homo sapiens
agcagccacagcttgctctgaccagagtgcctagcgtctctcagcctggagtccgtcctgcctgccctgggcagcctttggcca

SEQ ID NO: 193467 - DNA, 82 bp, Homo sapiens
acagcttgctctgaccagagtgcctagcgtctctcagcctggagtccgtcctgcctgccctgggcagcctttggccaatgga

SEQ ID NO: 193468 - DNA, 75 bp, Homo sapiens
accagagtgcctagcgtctctcagcctggagtccgtcctgcctgccctgggcagcctttggccaatggacccttt

SEQ ID NO: 193469 - DNA, 77 bp, Homo sapiens
agtgcctagcgtctctcagcctggagtccgtcctgcctgccctgggcagcctttggccaatggacccttttctgcag

SEQ ID NO: 193470 - DNA, 77 bp, Homo sapiens
tcagcctggagtccgtcctgcctgccctgggcagcctttggccaatggacccttttctgcaggccatgttccctgta

SEQ ID NO: 193471 - DNA, 77 bp, Homo sapiens
agtccgtcctgcctgccctgggcagcctttggccaatggacccttttctgcaggccatgttccctgtagcacatcaa

SEQ ID NO: 193472 - DNA, 77 bp, Homo sapiens
cctgccctgggcagcctttggccaatggacccttttctgcaggccatgttccctgtagcacatcaagaacgctggga

SEQ ID NO: 193473 - DNA, 78 bp, Homo sapiens
tgggcagcctttggccaatggacccttttctgcaggccatgttccctgtagcacatcaagaacgctgggaagtacaga

SEQ ID NO: 193474 - DNA, 76 bp, Homo sapiens
tttggccaatggacccttttctgcaggccatgttccctgtagcacatcaagaacgctgggaagtacagacactatt

SEQ ID NO: 193475 - DNA, 79 bp, Homo sapiens
aggccatgttccctgtagcacatcaagaacgctgggaagtacagacactattttgataggcaataatcatataacagga

SEQ ID NO: 193476 - DNA, 78 bp, Homo sapiens
atgttccctgtagcacatcaagaacgctgggaagtacagacactattttgataggcaataatcatataacaggaagtg

SEQ ID NO: 193477 - DNA, 76 bp, Homo sapiens
acatcaagaacgctgggaagtacagacactattttgataggcaataatcatataacaggaagtggaagtaatggaa

SEQ ID NO: 193478 - DNA, 73 bp, Homo sapiens
agaacgctgggaagtacagacactattttgataggcaataatcatataacaggaagtggaagtaatggaaacg

SEQ ID NO: 193479 - DNA, 75 bp, Homo sapiens
aagtacagacactattttgataggcaataatcatataacaggaagtggaagtaatggaaacgtgccttacctgca

SEQ ID NO: 193480 - DNA, 75 bp, Homo sapiens
actattttgataggcaataatcatataacaggaagtggaagtaatggaaacgtgccttacctgcagcgaaacgca

SEQ ID NO: 193481 - DNA, 77 bp, Homo sapiens
caataatcatataacaggaagtggaagtaatggaaacgtgccttacctgcagcgaaacgcactcactctacctcata

SEQ ID NO: 193482 - DNA, 75 bp, Homo sapiens
atcatataacaggaagtggaagtaatggaaacgtgccttacctgcagcgaaacgcactcactctacctcataacc

SEQ ID NO: 193483 - DNA, 74 bp, Homo sapiens
aagtggaagtaatggaaacgtgccttacctgcagcgaaacgcactcactctacctcataaccgcacaaacctga

SEQ ID NO: 193484 - DNA, 78 bp, Homo sapiens
ccttacctgcagcgaaacgcactcactctacctcataaccgcacaaacctgaccagcagcgcagaggagccgtggaaa

SEQ ID NO: 193485 - DNA, 75 bp, Homo sapiens
agcgaaacgcactcactctacctcataaccgcacaaacctgaccagcagcgcagaggagccgtggaaaaaccaac

SEQ ID NO: 193486 - DNA, 75 bp, Homo sapiens
actcactctacctcataaccgcacaaacctgaccagcagcgcagaggagccgtggaaaaaccaactatctaactc

SEQ ID NO: 193487 - DNA, 76 bp, Homo sapiens
ctctacctcataaccgcacaaacctgaccagcagcgcagaggagccgtggaaaaaccaactatctaactccactca

SEQ ID NO: 193488 - DNA, 75 bp, Homo sapiens
tgaccagcagcgcagaggagccgtggaaaaaccaactatctaactccactcaggtaataggaggactagcttcct

SEQ ID NO: 193489 - DNA, 72 bp, Homo sapiens
agcgcagaggagccgtggaaaaaccaactatctaactccactcaggtaataggaggactagcttccttgttg

SEQ ID NO: 193490 - DNA, 69 bp, Homo sapiens
ttttctttctttttaggggcttcacaaaggtcagagttcacattcggcaggtcctaatggtgaacgacc

SEQ ID NO: 193491 - DNA, 71 bp, Homo sapiens
tttctttttaggggcttcacaaaggtcagagttcacattcggcaggtcctaatggtgaacgacctctctct

SEQ ID NO: 193492 - DNA, 74 bp, Homo sapiens
cttcacaaaggtcagagttcacattcggcaggtcctaatggtgaacgacctctctcttccactgggccttccca

SEQ ID NO: 193493 - DNA, 75 bp, Homo sapiens
aaaggtcagagttcacattcggcaggtcctaatggtgaacgacctctctcttccactgggccttcccagcatctc

SEQ ID NO: 193494 - DNA, 80 bp, Homo sapiens
ttcacattcggcaggtcctaatggtgaacgacctctctcttccactgggccttcccagcatctccaggcagctggctctg

SEQ ID NO: 193495 - DNA, 79 bp, Homo sapiens
aatggtgaacgacctctctcttccactgggccttcccagcatctccaggcagctggctctggtattcagaatcagaacg

SEQ ID NO: 193496 - DNA, 79 bp, Homo sapiens
acctctctcttccactgggccttcccagcatctccaggcagctggctctggtattcagaatcagaacggacatcccacc

SEQ ID NO: 193497 - DNA, 81 bp, Homo sapiens
actgggccttcccagcatctccaggcagctggctctggtattcagaatcagaacggacatcccaccctgcctagcaattca

SEQ ID NO: 193498 - DNA, 82 bp, Homo sapiens
ttcccagcatctccaggcagctggctctggtattcagaatcagaacggacatcccaccctgcctagcaattcagtaacacag

SEQ ID NO: 193499 - DNA, 79 bp, Homo sapiens
atctccaggcagctggctctggtattcagaatcagaacggacatcccaccctgcctagcaattcagtaacacagggggc

SEQ ID NO: 193500 - DNA, 81 bp, Homo sapiens
agctggctctggtattcagaatcagaacggacatcccaccctgcctagcaattcagtaacacagggggctgctctcaatca

SEQ ID NO: 193501 - DNA, 81 bp, Homo sapiens
tattcagaatcagaacggacatcccaccctgcctagcaattcagtaacacagggggctgctctcaatcacctctcctctca

SEQ ID NO: 193502 - DNA, 81 bp, Homo sapiens
atcagaacggacatcccaccctgcctagcaattcagtaacacagggggctgctctcaatcacctctcctctcacactgcta

SEQ ID NO: 193503 - DNA, 80 bp, Homo sapiens
ccaccctgcctagcaattcagtaacacagggggctgctctcaatcacctctcctctcacactgctacctcaggtggacaa

SEQ ID NO: 193504 - DNA, 81 bp, Homo sapiens
tagcaattcagtaacacagggggctgctctcaatcacctctcctctcacactgctacctcaggtggacaacaaggcattac

SEQ ID NO: 193505 - DNA, 77 bp, Homo sapiens
agtaacacagggggctgctctcaatcacctctcctctcacactgctacctcaggtggacaacaaggcattaccttaa

SEQ ID NO: 193506 - DNA, 79 bp, Homo sapiens
gggctgctctcaatcacctctcctctcacactgctacctcaggtggacaacaaggcattaccttaaccaaagagagcaa

SEQ ID NO: 193507 - DNA, 79 bp, Homo sapiens
tctcaatcacctctcctctcacactgctacctcaggtggacaacaaggcattaccttaaccaaagagagcaagccttca

SEQ ID NO: 193508 - DNA, 74 bp, Homo sapiens
acactgctacctcaggtggacaacaaggcattaccttaaccaaagagagcaagccttcaggaaacatattgacg

SEQ ID NO: 193509 - DNA, 73 bp, Homo sapiens
aggtggacaacaaggcattaccttaaccaaagagagcaagccttcaggaaacatattgacggtgcctgaaaca

SEQ ID NO: 193510 - DNA, 75 bp, Homo sapiens
acaacaaggcattaccttaaccaaagagagcaagccttcaggaaacatattgacggtgcctgaaacaagcaggca

SEQ ID NO: 193511 - DNA, 76 bp, Homo sapiens
attaccttaaccaaagagagcaagccttcaggaaacatattgacggtgcctgaaacaagcaggcacactggagaga

SEQ ID NO: 193512 - DNA, 79 bp, Homo sapiens
accaaagagagcaagccttcaggaaacatattgacggtgcctgaaacaagcaggcacactggagagacacctaacagca

SEQ ID NO: 193513 - DNA, 80 bp, Homo sapiens
aagccttcaggaaacatattgacggtgcctgaaacaagcaggcacactggagagacacctaacagcactgccagtgtcga

SEQ ID NO: 193514 - DNA, 79 bp, Homo sapiens
acatattgacggtgcctgaaacaagcaggcacactggagagacacctaacagcactgccagtgtcgagggacttcctaa

SEQ ID NO: 193515 - DNA, 81 bp, Homo sapiens
ttgacggtgcctgaaacaagcaggcacactggagagacacctaacagcactgccagtgtcgagggacttcctaatcatgtc

SEQ ID NO: 193516 - DNA, 83 bp, Homo sapiens
aaacaagcaggcacactggagagacacctaacagcactgccagtgtcgagggacttcctaatcatgtccatcagatgacggca

SEQ ID NO: 193517 - DNA, 85 bp, Homo sapiens
acactggagagacacctaacagcactgccagtgtcgagggacttcctaatcatgtccatcagatgacggcagatgctgtttgcag

SEQ ID NO: 193518 - DNA, 85 bp, Homo sapiens
ggagagacacctaacagcactgccagtgtcgagggacttcctaatcatgtccatcagatgacggcagatgctgtttgcagtccta

SEQ ID NO: 193519 - DNA, 86 bp, Homo sapiens
agcactgccagtgtcgagggacttcctaatcatgtccatcagatgacggcagatgctgtttgcagtcctagccatggagattctaa

SEQ ID NO: 193520 - DNA, 82 bp, Homo sapiens
acttcctaatcatgtccatcagatgacggcagatgctgtttgcagtcctagccatggagattctaagtcaccaggtttacta

SEQ ID NO: 193521 - DNA, 84 bp, Homo sapiens
taatcatgtccatcagatgacggcagatgctgtttgcagtcctagccatggagattctaagtcaccaggtttactaagttcaga

SEQ ID NO: 193522 - DNA, 82 bp, Homo sapiens
atcagatgacggcagatgctgtttgcagtcctagccatggagattctaagtcaccaggtttactaagttcagacaatcctca

SEQ ID NO: 193523 - DNA, 80 bp, Homo sapiens
acggcagatgctgtttgcagtcctagccatggagattctaagtcaccaggtttactaagttcagacaatcctcagctctc

SEQ ID NO: 193524 - DNA, 80 bp, Homo sapiens
tgtttgcagtcctagccatggagattctaagtcaccaggtttactaagttcagacaatcctcagctctctgccttgttga

SEQ ID NO: 193525 - DNA, 77 bp, Homo sapiens
ctagccatggagattctaagtcaccaggtttactaagttcagacaatcctcagctctctgccttgttgatgggaaaa

SEQ ID NO: 193526 - DNA, 75 bp, Homo sapiens
agattctaagtcaccaggtttactaagttcagacaatcctcagctctctgccttgttgatgggaaaagccaataa

SEQ ID NO: 193527 - DNA, 74 bp, Homo sapiens
accaggtttactaagttcagacaatcctcagctctctgccttgttgatgggaaaagccaataacaatgtgggta

SEQ ID NO: 193528 - DNA, 75 bp, Homo sapiens
tttactaagttcagacaatcctcagctctctgccttgttgatgggaaaagccaataacaatgtgggtactggaac

SEQ ID NO: 193529 - DNA, 77 bp, Homo sapiens
caatcctcagctctctgccttgttgatgggaaaagccaataacaatgtgggtactggaacctgtgacaaagtcaata

SEQ ID NO: 193530 - DNA, 76 bp, Homo sapiens
agctctctgccttgttgatgggaaaagccaataacaatgtgggtactggaacctgtgacaaagtcaataacatcca

SEQ ID NO: 193531 - DNA, 74 bp, Homo sapiens
ttgttgatgggaaaagccaataacaatgtgggtactggaacctgtgacaaagtcaataacatccacccagctgt

SEQ ID NO: 193532 - DNA, 75 bp, Homo sapiens
aataacaatgtgggtactggaacctgtgacaaagtcaataacatccacccagctgttcatacaaagactgataac

SEQ ID NO: 193533 - DNA, 79 bp, Homo sapiens
aaagtcaataacatccacccagctgttcatacaaagactgataactctgttgcctcttcaccatcttcagccatttcaa

SEQ ID NO: 193534 - DNA, 80 bp, Homo sapiens
tgttcatacaaagactgataactctgttgcctcttcaccatcttcagccatttcaacagcaacaccttctccaaaatcca

SEQ ID NO: 193535 - DNA, 79 bp, Homo sapiens
atacaaagactgataactctgttgcctcttcaccatcttcagccatttcaacagcaacaccttctccaaaatccactga

SEQ ID NO: 193536 - DNA, 80 bp, Homo sapiens
taactctgttgcctcttcaccatcttcagccatttcaacagcaacaccttctccaaaatccactgagcagacaaccacaa

SEQ ID NO: 193537 - DNA, 78 bp, Homo sapiens
ctcttcaccatcttcagccatttcaacagcaacaccttctccaaaatccactgagcagacaaccacaaacagtgttac

SEQ ID NO: 193538 - DNA, 77 bp, Homo sapiens
tcttcagccatttcaacagcaacaccttctccaaaatccactgagcagacaaccacaaacagtgttaccagccttaa

SEQ ID NO: 193539 - DNA, 74 bp, Homo sapiens
atttcaacagcaacaccttctccaaaatccactgagcagacaaccacaaacagtgttaccagccttaacagccc

SEQ ID NO: 193540 - DNA, 76 bp, Homo sapiens
acagcaacaccttctccaaaatccactgagcagacaaccacaaacagtgttaccagccttaacagccctcacagtg

SEQ ID NO: 193541 - DNA, 77 bp, Homo sapiens
tccaaaatccactgagcagacaaccacaaacagtgttaccagccttaacagccctcacagtgggctacacacaatta

SEQ ID NO: 193542 - DNA, 74 bp, Homo sapiens
agacaaccacaaacagtgttaccagccttaacagccctcacagtgggctacacacaattaatggagaagggatg

SEQ ID NO: 193543 - DNA, 75 bp, Homo sapiens
aaacagtgttaccagccttaacagccctcacagtgggctacacacaattaatggagaagggatggaagaatctca

SEQ ID NO: 193544 - DNA, 76 bp, Homo sapiens
agccttaacagccctcacagtgggctacacacaattaatggagaagggatggaagaatctcagagccccatgaaaa

SEQ ID NO: 193545 - DNA, 79 bp, Homo sapiens
aacagccctcacagtgggctacacacaattaatggagaagggatggaagaatctcagagccccatgaaaacagatctgc

SEQ ID NO: 193546 - DNA, 77 bp, Homo sapiens
agtgggctacacacaattaatggagaagggatggaagaatctcagagccccatgaaaacagatctgcttctggttaa

SEQ ID NO: 193547 - DNA, 76 bp, Homo sapiens
acacacaattaatggagaagggatggaagaatctcagagccccatgaaaacagatctgcttctggttaaccacaaa

SEQ ID NO: 193548 - DNA, 80 bp, Homo sapiens
agagccccatgaaaacagatctgcttctggttaaccacaaacctagtccacagatcataccatcaatgtctgtgtccata

SEQ ID NO: 193549 - DNA, 79 bp, Homo sapiens
ccatgaaaacagatctgcttctggttaaccacaaacctagtccacagatcataccatcaatgtctgtgtccatataccc

SEQ ID NO: 193550 - DNA, 81 bp, Homo sapiens
tctgcttctggttaaccacaaacctagtccacagatcataccatcaatgtctgtgtccatataccccagctcagcagaagt

SEQ ID NO: 193551 - DNA, 81 bp, Homo sapiens
tctggttaaccacaaacctagtccacagatcataccatcaatgtctgtgtccatataccccagctcagcagaagttctgaa

SEQ ID NO: 193552 - DNA, 83 bp, Homo sapiens
acaaacctagtccacagatcataccatcaatgtctgtgtccatataccccagctcagcagaagttctgaaggcatgcaggtta

SEQ ID NO: 193553 - DNA, 82 bp, Homo sapiens
ataccatcaatgtctgtgtccatataccccagctcagcagaagttctgaaggcatgcaggttagtgtgggaaagttcatcaa

SEQ ID NO: 193554 - DNA, 80 bp, Homo sapiens
atgtctgtgtccatataccccagctcagcagaagttctgaaggcatgcaggttagtgtgggaaagttcatcaaagtgaaa

SEQ ID NO: 193555 - DNA, 70 bp, Homo sapiens
tttttttccaggaatctaggtaaaaatggcttatctaacagtagcattttgttggataaatgtccacctc

SEQ ID NO: 193556 - DNA, 73 bp, Homo sapiens
ttccaggaatctaggtaaaaatggcttatctaacagtagcattttgttggataaatgtccacctccaagacca

SEQ ID NO: 193557 - DNA, 73 bp, Homo sapiens
ctaggtaaaaatggcttatctaacagtagcattttgttggataaatgtccacctccaagaccaccatcttcac

SEQ ID NO: 193558 - DNA, 75 bp, Homo sapiens
ttatctaacagtagcattttgttggataaatgtccacctccaagaccaccatcttcaccataccctcccttgcca

SEQ ID NO: 193559 - DNA, 73 bp, Homo sapiens
taacagtagcattttgttggataaatgtccacctccaagaccaccatcttcaccataccctcccttgccaaag

SEQ ID NO: 193560 - DNA, 73 bp, Homo sapiens
ttgttggataaatgtccacctccaagaccaccatcttcaccataccctcccttgccaaaggacaagttgaatc

SEQ ID NO: 193561 - DNA, 72 bp, Homo sapiens
ataaatgtccacctccaagaccaccatcttcaccataccctcccttgccaaaggacaagttgaatccaccta

SEQ ID NO: 193562 - DNA, 72 bp, Homo sapiens
tccaagaccaccatcttcaccataccctcccttgccaaaggacaagttgaatccacctacacctagtattta

SEQ ID NO: 193563 - DNA, 72 bp, Homo sapiens
atcttcaccataccctcccttgccaaaggacaagttgaatccacctacacctagtatttacgtgagtctgaa

SEQ ID NO: 193564 - DNA, 73 bp, Homo sapiens
taccctcccttgccaaaggacaagttgaatccacctacacctagtatttacgtgagtctgaattgactgacta

SEQ ID NO: 193565 - DNA, 73 bp, Homo sapiens
ttgccaaaggacaagttgaatccacctacacctagtatttacgtgagtctgaattgactgactagaaataaaa

SEQ ID NO: 193566 - DNA, 70 bp, Homo sapiens
aaagctctgttttcctgagatctaaccacatattttaattttacagttggaaaataaacgtgatgctttc

SEQ ID NO: 193567 - DNA, 69 bp, Homo sapiens
ctgttttcctgagatctaaccacatattttaattttacagttggaaaataaacgtgatgctttctttcc

SEQ ID NO: 193568 - DNA, 72 bp, Homo sapiens
gagatctaaccacatattttaattttacagttggaaaataaacgtgatgctttctttcctccattacatcaa

SEQ ID NO: 193569 - DNA, 71 bp, Homo sapiens
cacatattttaattttacagttggaaaataaacgtgatgctttctttcctccattacatcaattttgtaca

SEQ ID NO: 193570 - DNA, 70 bp, Homo sapiens
ttacagttggaaaataaacgtgatgctttctttcctccattacatcaattttgtacaaatccgaacaacc

SEQ ID NO: 193571 - DNA, 70 bp, Homo sapiens
gaaaataaacgtgatgctttctttcctccattacatcaattttgtacaaatccgaacaaccctgttacag

SEQ ID NO: 193572 - DNA, 70 bp, Homo sapiens
aaacgtgatgctttctttcctccattacatcaattttgtacaaatccgaacaaccctgttacagtaatac

SEQ ID NO: 193573 - DNA, 72 bp, Homo sapiens
ttctttcctccattacatcaattttgtacaaatccgaacaaccctgttacagtaatacgtggccttgctgga

SEQ ID NO: 193574 - DNA, 72 bp, Homo sapiens
ttacatcaattttgtacaaatccgaacaaccctgttacagtaatacgtggccttgctggagctcttaagtta

SEQ ID NO: 193575 - DNA, 69 bp, Homo sapiens
attttgtacaaatccgaacaaccctgttacagtaatacgtggccttgctggagctcttaagttaggtaa

SEQ ID NO: 193576 - DNA, 69 bp, Homo sapiens
atccgaacaaccctgttacagtaatacgtggccttgctggagctcttaagttaggtaagccttaaatta

SEQ ID NO: 193577 - DNA, 67 bp, Homo sapiens
ctgttacagtaatacgtggccttgctggagctcttaagttaggtaagccttaaattaaaaaaggaaa

SEQ ID NO: 193578 - DNA, 64 bp, Homo sapiens
agtaatacgtggccttgctggagctcttaagttaggtaagccttaaattaaaaaaggaaaacgt

SEQ ID NO: 193579 - DNA, 70 bp, Homo sapiens
tcccaaatataattttcattttttaactacatttatgtattcatgaagacctgggacttttctctactaa

SEQ ID NO: 193580 - DNA, 68 bp, Homo sapiens
ttttcattttttaactacatttatgtattcatgaagacctgggacttttctctactaaaactttggtg

SEQ ID NO: 193581 - DNA, 72 bp, Homo sapiens
ttaactacatttatgtattcatgaagacctgggacttttctctactaaaactttggtggaagctaacaatga

SEQ ID NO: 193582 - DNA, 74 bp, Homo sapiens
ttatgtattcatgaagacctgggacttttctctactaaaactttggtggaagctaacaatgaacatatggtaga

SEQ ID NO: 193583 - DNA, 74 bp, Homo sapiens
tattcatgaagacctgggacttttctctactaaaactttggtggaagctaacaatgaacatatggtagaagtga

SEQ ID NO: 193584 - DNA, 72 bp, Homo sapiens
tgggacttttctctactaaaactttggtggaagctaacaatgaacatatggtagaagtgaggacacagttgt

SEQ ID NO: 193585 - DNA, 79 bp, Homo sapiens
tctactaaaactttggtggaagctaacaatgaacatatggtagaagtgaggacacagttgttgcagccagcagatgaaa

SEQ ID NO: 193586 - DNA, 78 bp, Homo sapiens
taaaactttggtggaagctaacaatgaacatatggtagaagtgaggacacagttgttgcagccagcagatgaaaactg

SEQ ID NO: 193587 - DNA, 80 bp, Homo sapiens
agctaacaatgaacatatggtagaagtgaggacacagttgttgcagccagcagatgaaaactgggatcccactggaacaa

SEQ ID NO: 193588 - DNA, 78 bp, Homo sapiens
aatgaacatatggtagaagtgaggacacagttgttgcagccagcagatgaaaactgggatcccactggaacaaagaaa

SEQ ID NO: 193589 - DNA, 80 bp, Homo sapiens
tagaagtgaggacacagttgttgcagccagcagatgaaaactgggatcccactggaacaaagaaaatctggcattgtgaa

SEQ ID NO: 193590 - DNA, 79 bp, Homo sapiens
gacacagttgttgcagccagcagatgaaaactgggatcccactggaacaaagaaaatctggcattgtgaaagtaataga

SEQ ID NO: 193591 - DNA, 81 bp, Homo sapiens
ttgcagccagcagatgaaaactgggatcccactggaacaaagaaaatctggcattgtgaaagtaatagatctcatactaca

SEQ ID NO: 193592 - DNA, 78 bp, Homo sapiens
cagatgaaaactgggatcccactggaacaaagaaaatctggcattgtgaaagtaatagatctcatactacaattgcta

SEQ ID NO: 193593 - DNA, 75 bp, Homo sapiens
aaactgggatcccactggaacaaagaaaatctggcattgtgaaagtaatagatctcatactacaattgctaaata

SEQ ID NO: 193594 - DNA, 79 bp, Homo sapiens
atcccactggaacaaagaaaatctggcattgtgaaagtaatagatctcatactacaattgctaaatatgcacagtacca

SEQ ID NO: 193595 - DNA, 79 bp, Homo sapiens
aaagaaaatctggcattgtgaaagtaatagatctcatactacaattgctaaatatgcacagtaccaggcctcctcattc

SEQ ID NO: 193596 - DNA, 82 bp, Homo sapiens
atctggcattgtgaaagtaatagatctcatactacaattgctaaatatgcacagtaccaggcctcctcattccaggaatcat

SEQ ID NO: 193597 - DNA, 80 bp, Homo sapiens
aagtaatagatctcatactacaattgctaaatatgcacagtaccaggcctcctcattccaggaatcattgagagtaagta

SEQ ID NO: 193598 - DNA, 82 bp, Homo sapiens
tagatctcatactacaattgctaaatatgcacagtaccaggcctcctcattccaggaatcattgagagtaagtatttgtatc

SEQ ID NO: 193599 - DNA, 77 bp, Homo sapiens
aattgctaaatatgcacagtaccaggcctcctcattccaggaatcattgagagtaagtatttgtatcctaaagatta

SEQ ID NO: 193600 - DNA, 76 bp, Homo sapiens
taaatatgcacagtaccaggcctcctcattccaggaatcattgagagtaagtatttgtatcctaaagattatttta

SEQ ID NO: 193601 - DNA, 73 bp, Homo sapiens
ttgtatggtggaaaggattgccagttgtagaacactaaactagactgctttttgcttaatctataggaagaaa

SEQ ID NO: 193602 - DNA, 72 bp, Homo sapiens
gtggaaaggattgccagttgtagaacactaaactagactgctttttgcttaatctataggaagaaaatgaaa

SEQ ID NO: 193603 - DNA, 73 bp, Homo sapiens
gccagttgtagaacactaaactagactgctttttgcttaatctataggaagaaaatgaaaaaagaagtcatca

SEQ ID NO: 193604 - DNA, 73 bp, Homo sapiens
cactaaactagactgctttttgcttaatctataggaagaaaatgaaaaaagaagtcatcataaagaccactca

SEQ ID NO: 193605 - DNA, 75 bp, Homo sapiens
agactgctttttgcttaatctataggaagaaaatgaaaaaagaagtcatcataaagaccactcagatagtgaatc

SEQ ID NO: 193606 - DNA, 79 bp, Homo sapiens
tgcttaatctataggaagaaaatgaaaaaagaagtcatcataaagaccactcagatagtgaatctacatcgtcagataa

SEQ ID NO: 193607 - DNA, 77 bp, Homo sapiens
ataggaagaaaatgaaaaaagaagtcatcataaagaccactcagatagtgaatctacatcgtcagataagtaagtca

SEQ ID NO: 193608 - DNA, 76 bp, Homo sapiens
aatgaaaaaagaagtcatcataaagaccactcagatagtgaatctacatcgtcagataagtaagtcatttttaatg

SEQ ID NO: 193609 - DNA, 78 bp, Homo sapiens
gaagtcatcataaagaccactcagatagtgaatctacatcgtcagataagtaagtcatttttaatgtccacttagtat

SEQ ID NO: 193610 - DNA, 77 bp, Homo sapiens
catcataaagaccactcagatagtgaatctacatcgtcagataagtaagtcatttttaatgtccacttagtatttct

SEQ ID NO: 193611 - DNA, 73 bp, Homo sapiens
accactcagatagtgaatctacatcgtcagataagtaagtcatttttaatgtccacttagtatttctttttaa

SEQ ID NO: 193612 - DNA, 71 bp, Homo sapiens
agtgaatctacatcgtcagataagtaagtcatttttaatgtccacttagtatttctttttaaaaggcatgt

SEQ ID NO: 193613 - DNA, 70 bp, Homo sapiens
catcgtcagataagtaagtcatttttaatgtccacttagtatttctttttaaaaggcatgtttctaatac

SEQ ID NO: 193614 - DNA, 68 bp, Homo sapiens
gtaagtcatttttaatgtccacttagtatttctttttaaaaggcatgtttctaatactgtgtctcttt

SEQ ID NO: 193615 - DNA, 68 bp, Homo sapiens
ttaatgtccacttagtatttctttttaaaaggcatgtttctaatactgtgtctcttttttaagttctg

SEQ ID NO: 193616 - DNA, 67 bp, Homo sapiens
aatgtccacttagtatttctttttaaaaggcatgtttctaatactgtgtctcttttttaagttctgg

SEQ ID NO: 193617 - DNA, 67 bp, Homo sapiens
gtccacttagtatttctttttaaaaggcatgtttctaatactgtgtctcttttttaagttctgggag

SEQ ID NO: 193618 - DNA, 67 bp, Homo sapiens
agtatttctttttaaaaggcatgtttctaatactgtgtctcttttttaagttctgggaggaggagga

SEQ ID NO: 193619 - DNA, 67 bp, Homo sapiens
tctttttaaaaggcatgtttctaatactgtgtctcttttttaagttctgggaggaggaggaaaggac

SEQ ID NO: 193620 - DNA, 66 bp, Homo sapiens
tgtttctaatactgtgtctcttttttaagttctgggaggaggaggaaaggaccctttaaaaccata

SEQ ID NO: 193621 - DNA, 63 bp, Homo sapiens
aatactgtgtctcttttttaagttctgggaggaggaggaaaggaccctttaaaaccataaagt

SEQ ID NO: 193622 - DNA, 62 bp, Homo sapiens
ttttttaagttctgggaggaggaggaaaggaccctttaaaaccataaagtttgggaccaata

SEQ ID NO: 193623 - DNA, 65 bp, Homo sapiens
taagttctgggaggaggaggaaaggaccctttaaaaccataaagtttgggaccaatattgaccta

SEQ ID NO: 193624 - DNA, 67 bp, Homo sapiens
ggaggaaaggaccctttaaaaccataaagtttgggaccaatattgacctatctgatgacaaaaagta

SEQ ID NO: 193625 - DNA, 67 bp, Homo sapiens
ggaccctttaaaaccataaagtttgggaccaatattgacctatctgatgacaaaaagtaagtccttg

SEQ ID NO: 193626 - DNA, 72 bp, Homo sapiens
accataaagtttgggaccaatattgacctatctgatgacaaaaagtaagtccttgtagtaatatttctgtga

SEQ ID NO: 193627 - DNA, 76 bp, Homo sapiens
tttgggaccaatattgacctatctgatgacaaaaagtaagtccttgtagtaatatttctgtgaactgatgcaaaga

SEQ ID NO: 193628 - DNA, 76 bp, Homo sapiens
ccaatattgacctatctgatgacaaaaagtaagtccttgtagtaatatttctgtgaactgatgcaaagagttatcc

SEQ ID NO: 193629 - DNA, 78 bp, Homo sapiens
aggtatttgtagcagagtttcacttttgatgtgttattttattgcaggtggaagttgcagctacatgagctgactaaa

SEQ ID NO: 193630 - DNA, 79 bp, Homo sapiens
tagcagagtttcacttttgatgtgttattttattgcaggtggaagttgcagctacatgagctgactaaacttcctgctt

SEQ ID NO: 193631 - DNA, 78 bp, Homo sapiens
tttcacttttgatgtgttattttattgcaggtggaagttgcagctacatgagctgactaaacttcctgcttttgtgcg

SEQ ID NO: 193632 - DNA, 81 bp, Homo sapiens
tgttattttattgcaggtggaagttgcagctacatgagctgactaaacttcctgcttttgtgcgtgtcgtatcagcaggaa

SEQ ID NO: 193633 - DNA, 80 bp, Homo sapiens
ttttattgcaggtggaagttgcagctacatgagctgactaaacttcctgcttttgtgcgtgtcgtatcagcaggaaatct

SEQ ID NO: 193634 - DNA, 80 bp, Homo sapiens
aagttgcagctacatgagctgactaaacttcctgcttttgtgcgtgtcgtatcagcaggaaatcttctaagccatgttgg

SEQ ID NO: 193635 - DNA, 81 bp, Homo sapiens
tacatgagctgactaaacttcctgcttttgtgcgtgtcgtatcagcaggaaatcttctaagccatgttggtcataccatat

SEQ ID NO: 193636 - DNA, 78 bp, Homo sapiens
agctgactaaacttcctgcttttgtgcgtgtcgtatcagcaggaaatcttctaagccatgttggtcataccatattgg

SEQ ID NO: 193637 - DNA, 80 bp, Homo sapiens
aacttcctgcttttgtgcgtgtcgtatcagcaggaaatcttctaagccatgttggtcataccatattgggcatgaacaca

SEQ ID NO: 193638 - DNA, 81 bp, Homo sapiens
ttttgtgcgtgtcgtatcagcaggaaatcttctaagccatgttggtcataccatattgggcatgaacacagttcaactata

SEQ ID NO: 193639 - DNA, 81 bp, Homo sapiens
tcgtatcagcaggaaatcttctaagccatgttggtcataccatattgggcatgaacacagttcaactatacatgaaagttc

SEQ ID NO: 193640 - DNA, 77 bp, Homo sapiens
aggaaatcttctaagccatgttggtcataccatattgggcatgaacacagttcaactatacatgaaagttccaggga

SEQ ID NO: 193641 - DNA, 80 bp, Homo sapiens
tctaagccatgttggtcataccatattgggcatgaacacagttcaactatacatgaaagttccagggagcagaacaccag

SEQ ID NO: 193642 - DNA, 79 bp, Homo sapiens
tcataccatattgggcatgaacacagttcaactatacatgaaagttccagggagcagaacaccaggtaatttgtatgaa

SEQ ID NO: 193643 - DNA, 76 bp, Homo sapiens
atattgggcatgaacacagttcaactatacatgaaagttccagggagcagaacaccaggtaatttgtatgaactaa

SEQ ID NO: 193644 - DNA, 74 bp, Homo sapiens
aacacagttcaactatacatgaaagttccagggagcagaacaccaggtaatttgtatgaactaacatatcttgt

SEQ ID NO: 193645 - DNA, 73 bp, Homo sapiens
gttcaactatacatgaaagttccagggagcagaacaccaggtaatttgtatgaactaacatatcttgttaaaa

SEQ ID NO: 193646 - DNA, 71 bp, Homo sapiens
ttttttcttttcacatttcaggtcatcaggaaaataacaacttctgttcagttaacataaatattggccca

SEQ ID NO: 193647 - DNA, 75 bp, Homo sapiens
tttcacatttcaggtcatcaggaaaataacaacttctgttcagttaacataaatattggcccaggtgactgtgaa

SEQ ID NO: 193648 - DNA, 73 bp, Homo sapiens
tttcaggtcatcaggaaaataacaacttctgttcagttaacataaatattggcccaggtgactgtgaatggtt

SEQ ID NO: 193649 - DNA, 71 bp, Homo sapiens
aaaataacaacttctgttcagttaacataaatattggcccaggtgactgtgaatggtttgttgttcctgaa

SEQ ID NO: 193650 - DNA, 71 bp, Homo sapiens
aacaacttctgttcagttaacataaatattggcccaggtgactgtgaatggtttgttgttcctgaaggtta

SEQ ID NO: 193651 - DNA, 71 bp, Homo sapiens
gttaacataaatattggcccaggtgactgtgaatggtttgttgttcctgaaggttactggggtgttctgaa

SEQ ID NO: 193652 - DNA, 72 bp, Homo sapiens
ataaatattggcccaggtgactgtgaatggtttgttgttcctgaaggttactggggtgttctgaatgacttc

SEQ ID NO: 193653 - DNA, 71 bp, Homo sapiens
aggtgactgtgaatggtttgttgttcctgaaggttactggggtgttctgaatgacttctgtgaaaagtagg

SEQ ID NO: 193654 - DNA, 70 bp, Homo sapiens
tgaatggtttgttgttcctgaaggttactggggtgttctgaatgacttctgtgaaaagtaggtttccaaa

SEQ ID NO: 193655 - DNA, 67 bp, Homo sapiens
ttgttcctgaaggttactggggtgttctgaatgacttctgtgaaaagtaggtttccaaagtaaattt

SEQ ID NO: 193656 - DNA, 67 bp, Homo sapiens
cctgaaggttactggggtgttctgaatgacttctgtgaaaagtaggtttccaaagtaaattttctta

SEQ ID NO: 193657 - DNA, 69 bp, Homo sapiens
gcattatttttttcttatttcagaaataatttgaatttcctaatgggttcttggtggcccaatcttgaa

SEQ ID NO: 193658 - DNA, 73 bp, Homo sapiens
ttcttatttcagaaataatttgaatttcctaatgggttcttggtggcccaatcttgaagatctttatgaagca

SEQ ID NO: 193659 - DNA, 72 bp, Homo sapiens
agaaataatttgaatttcctaatgggttcttggtggcccaatcttgaagatctttatgaagcaaatgttcca

SEQ ID NO: 193660 - DNA, 73 bp, Homo sapiens
aatttgaatttcctaatgggttcttggtggcccaatcttgaagatctttatgaagcaaatgttccagtgtata

SEQ ID NO: 193661 - DNA, 75 bp, Homo sapiens
taatgggttcttggtggcccaatcttgaagatctttatgaagcaaatgttccagtgtataggtttattcagcgac

SEQ ID NO: 193662 - DNA, 76 bp, Homo sapiens
tggtggcccaatcttgaagatctttatgaagcaaatgttccagtgtataggtttattcagcgacctggagatttgg

SEQ ID NO: 193663 - DNA, 76 bp, Homo sapiens
atcttgaagatctttatgaagcaaatgttccagtgtataggtttattcagcgacctggagatttggtctggataaa

SEQ ID NO: 193664 - DNA, 78 bp, Homo sapiens
aagatctttatgaagcaaatgttccagtgtataggtttattcagcgacctggagatttggtctggataaatgcaggca

SEQ ID NO: 193665 - DNA, 76 bp, Homo sapiens
caaatgttccagtgtataggtttattcagcgacctggagatttggtctggataaatgcaggcactgttcattgggt

SEQ ID NO: 193666 - DNA, 77 bp, Homo sapiens
agtgtataggtttattcagcgacctggagatttggtctggataaatgcaggcactgttcattgggttcaggctattg

SEQ ID NO: 193667 - DNA, 77 bp, Homo sapiens
ataggtttattcagcgacctggagatttggtctggataaatgcaggcactgttcattgggttcaggctattggctgg

SEQ ID NO: 193668 - DNA, 81 bp, Homo sapiens
gacctggagatttggtctggataaatgcaggcactgttcattgggttcaggctattggctggtgcaacaacattgcttgga

SEQ ID NO: 193669 - DNA, 80 bp, Homo sapiens
agatttggtctggataaatgcaggcactgttcattgggttcaggctattggctggtgcaacaacattgcttggaatgttg

SEQ ID NO: 193670 - DNA, 79 bp, Homo sapiens
ataaatgcaggcactgttcattgggttcaggctattggctggtgcaacaacattgcttggaatgttggtccacttacag

SEQ ID NO: 193671 - DNA, 78 bp, Homo sapiens
gcactgttcattgggttcaggctattggctggtgcaacaacattgcttggaatgttggtccacttacaggtattataa

SEQ ID NO: 193672 - DNA, 75 bp, Homo sapiens
attgggttcaggctattggctggtgcaacaacattgcttggaatgttggtccacttacaggtattataaagaata

SEQ ID NO: 193673 - DNA, 75 bp, Homo sapiens
aggctattggctggtgcaacaacattgcttggaatgttggtccacttacaggtattataaagaatatgctttaaa

SEQ ID NO: 193674 - DNA, 73 bp, Homo sapiens
tggctggtgcaacaacattgcttggaatgttggtccacttacaggtattataaagaatatgctttaaaaaagt

SEQ ID NO: 193675 - DNA, 68 bp, Homo sapiens
aacaacattgcttggaatgttggtccacttacaggtattataaagaatatgctttaaaaaagttaatt

SEQ ID NO: 193676 - DNA, 68 bp, Homo sapiens
tttttttttttcctagcctgccagtataaattggcagtggaacggtacgaatggaacaaattgcaaag

SEQ ID NO: 193677 - DNA, 74 bp, Homo sapiens
ttttcctagcctgccagtataaattggcagtggaacggtacgaatggaacaaattgcaaagtgtgaagtcaata

SEQ ID NO: 193678 - DNA, 72 bp, Homo sapiens
ccagtataaattggcagtggaacggtacgaatggaacaaattgcaaagtgtgaagtcaatagtacccatggt

SEQ ID NO: 193679 - DNA, 73 bp, Homo sapiens
taaattggcagtggaacggtacgaatggaacaaattgcaaagtgtgaagtcaatagtacccatggttcatctt

SEQ ID NO: 193680 - DNA, 72 bp, Homo sapiens
agtggaacggtacgaatggaacaaattgcaaagtgtgaagtcaatagtacccatggttcatctttcctggaa

SEQ ID NO: 193681 - DNA, 76 bp, Homo sapiens
aatggaacaaattgcaaagtgtgaagtcaatagtacccatggttcatctttcctggaatatggcacgaaatatcaa

SEQ ID NO: 193682 - DNA, 77 bp, Homo sapiens
aaattgcaaagtgtgaagtcaatagtacccatggttcatctttcctggaatatggcacgaaatatcaaggtctcaga

SEQ ID NO: 193683 - DNA, 76 bp, Homo sapiens
tgaagtcaatagtacccatggttcatctttcctggaatatggcacgaaatatcaaggtctcagatccaaagctttt

SEQ ID NO: 193684 - DNA, 74 bp, Homo sapiens
aatagtacccatggttcatctttcctggaatatggcacgaaatatcaaggtctcagatccaaagctttttgaaa

SEQ ID NO: 193685 - DNA, 75 bp, Homo sapiens
atggttcatctttcctggaatatggcacgaaatatcaaggtctcagatccaaagctttttgaaatgattaagtaa

SEQ ID NO: 193686 - DNA, 72 bp, Homo sapiens
ctttcctggaatatggcacgaaatatcaaggtctcagatccaaagctttttgaaatgattaagtaagtcttt

SEQ ID NO: 193687 - DNA, 73 bp, Homo sapiens
atggcacgaaatatcaaggtctcagatccaaagctttttgaaatgattaagtaagtcttttctaaaactgctg

SEQ ID NO: 193688 - DNA, 72 bp, Homo sapiens
atatcaaggtctcagatccaaagctttttgaaatgattaagtaagtcttttctaaaactgctgtagtccctc

SEQ ID NO: 193689 - DNA, 76 bp, Homo sapiens
tattcaatattcagttgctggtcacaaataatttctcccccacaataggtattgtcttctaagaactctgaagcaa

SEQ ID NO: 193690 - DNA, 78 bp, Homo sapiens
tattcagttgctggtcacaaataatttctcccccacaataggtattgtcttctaagaactctgaagcaatgtcagaca

SEQ ID NO: 193691 - DNA, 76 bp, Homo sapiens
tggtcacaaataatttctcccccacaataggtattgtcttctaagaactctgaagcaatgtcagacattgagggaa

SEQ ID NO: 193692 - DNA, 78 bp, Homo sapiens
ataatttctcccccacaataggtattgtcttctaagaactctgaagcaatgtcagacattgagggaagctctcattgc

SEQ ID NO: 193693 - DNA, 81 bp, Homo sapiens
acaataggtattgtcttctaagaactctgaagcaatgtcagacattgagggaagctctcattgctgcaggaaaagagatta

SEQ ID NO: 193694 - DNA, 84 bp, Homo sapiens
ggtattgtcttctaagaactctgaagcaatgtcagacattgagggaagctctcattgctgcaggaaaagagattatatggcatg

SEQ ID NO: 193695 - DNA, 83 bp, Homo sapiens
taagaactctgaagcaatgtcagacattgagggaagctctcattgctgcaggaaaagagattatatggcatgggcggacaaaa

SEQ ID NO: 193696 - DNA, 81 bp, Homo sapiens
aagcaatgtcagacattgagggaagctctcattgctgcaggaaaagagattatatggcatgggcggacaaaagaagaacca

SEQ ID NO: 193697 - DNA, 80 bp, Homo sapiens
agacattgagggaagctctcattgctgcaggaaaagagattatatggcatgggcggacaaaagaagaaccagctcattac

SEQ ID NO: 193698 - DNA, 82 bp, Homo sapiens
aagctctcattgctgcaggaaaagagattatatggcatgggcggacaaaagaagaaccagctcattactgtagcatttgtga

SEQ ID NO: 193699 - DNA, 79 bp, Homo sapiens
attgctgcaggaaaagagattatatggcatgggcggacaaaagaagaaccagctcattactgtagcatttgtgaagtaa

SEQ ID NO: 193700 - DNA, 75 bp, Homo sapiens
aaagagattatatggcatgggcggacaaaagaagaaccagctcattactgtagcatttgtgaagtaagtaattgt

SEQ ID NO: 193701 - DNA, 74 bp, Homo sapiens
attatatggcatgggcggacaaaagaagaaccagctcattactgtagcatttgtgaagtaagtaattgttttta

SEQ ID NO: 193702 - DNA, 72 bp, Homo sapiens
gcggacaaaagaagaaccagctcattactgtagcatttgtgaagtaagtaattgtttttatccacagttgtt

SEQ ID NO: 193703 - DNA, 71 bp, Homo sapiens
cagtaaataccactatctctattgaatacgtttttctcttgtataaaacaggtggaggtttttgatctgct

SEQ ID NO: 193704 - DNA, 72 bp, Homo sapiens
cactatctctattgaatacgtttttctcttgtataaaacaggtggaggtttttgatctgctttttgtcacta

SEQ ID NO: 193705 - DNA, 70 bp, Homo sapiens
gaatacgtttttctcttgtataaaacaggtggaggtttttgatctgctttttgtcactaatgagagtaat

SEQ ID NO: 193706 - DNA, 73 bp, Homo sapiens
tctcttgtataaaacaggtggaggtttttgatctgctttttgtcactaatgagagtaattcacgaaagaccta

SEQ ID NO: 193707 - DNA, 72 bp, Homo sapiens
ataaaacaggtggaggtttttgatctgctttttgtcactaatgagagtaattcacgaaagacctacatagta

SEQ ID NO: 193708 - DNA, 77 bp, Homo sapiens
aggtttttgatctgctttttgtcactaatgagagtaattcacgaaagacctacatagtacattgccaagattgtgca

SEQ ID NO: 193709 - DNA, 78 bp, Homo sapiens
ttgatctgctttttgtcactaatgagagtaattcacgaaagacctacatagtacattgccaagattgtgcacgaaaaa

SEQ ID NO: 193710 - DNA, 75 bp, Homo sapiens
tttttgtcactaatgagagtaattcacgaaagacctacatagtacattgccaagattgtgcacgaaaaacaagcg

SEQ ID NO: 193711 - DNA, 72 bp, Homo sapiens
agagtaattcacgaaagacctacatagtacattgccaagattgtgcacgaaaaacaagcggaaacttggaaa

SEQ ID NO: 193712 - DNA, 70 bp, Homo sapiens
aattcacgaaagacctacatagtacattgccaagattgtgcacgaaaaacaagcggaaacttggaaaact

SEQ ID NO: 193713 - DNA, 74 bp, Homo sapiens
tacatagtacattgccaagattgtgcacgaaaaacaagcggaaacttggaaaactttgtggtgctagaacagta

SEQ ID NO: 193714 - DNA, 72 bp, Homo sapiens
tacattgccaagattgtgcacgaaaaacaagcggaaacttggaaaactttgtggtgctagaacagtacaaaa

SEQ ID NO: 193715 - DNA, 70 bp, Homo sapiens
aagattgtgcacgaaaaacaagcggaaacttggaaaactttgtggtgctagaacagtacaaaatggagga

SEQ ID NO: 193716 - DNA, 71 bp, Homo sapiens
aaaacaagcggaaacttggaaaactttgtggtgctagaacagtacaaaatggaggacctgatgcaagtcta

SEQ ID NO: 193717 - DNA, 74 bp, Homo sapiens
gaaacttggaaaactttgtggtgctagaacagtacaaaatggaggacctgatgcaagtctatgaccaatttaca

SEQ ID NO: 193718 - DNA, 73 bp, Homo sapiens
aaaactttgtggtgctagaacagtacaaaatggaggacctgatgcaagtctatgaccaatttacattagtaag

SEQ ID NO: 193719 - DNA, 78 bp, Homo sapiens
ttgtggtgctagaacagtacaaaatggaggacctgatgcaagtctatgaccaatttacattagtaagtcaaatcaaca

SEQ ID NO: 193720 - DNA, 77 bp, Homo sapiens
agtacaaaatggaggacctgatgcaagtctatgaccaatttacattagtaagtcaaatcaacatgtgagtacatagt

SEQ ID NO: 193721 - DNA, 78 bp, Homo sapiens
aaaatggaggacctgatgcaagtctatgaccaatttacattagtaagtcaaatcaacatgtgagtacatagttagctg

SEQ ID NO: 193722 - DNA, 70 bp, Homo sapiens
ttaacaatttgtatatcaaaataacctaccttacttttattttcaggctcctccattaccatccgcctca

SEQ ID NO: 193723 - DNA, 72 bp, Homo sapiens
gtatatcaaaataacctaccttacttttattttcaggctcctccattaccatccgcctcatcttgatattgt

SEQ ID NO: 193724 - DNA, 71 bp, Homo sapiens
aaaataacctaccttacttttattttcaggctcctccattaccatccgcctcatcttgatattgttccatg

SEQ ID NO: 193725 - DNA, 75 bp, Homo sapiens
ttacttttattttcaggctcctccattaccatccgcctcatcttgatattgttccatggacattaaatgagacct

SEQ ID NO: 193726 - DNA, 78 bp, Homo sapiens
tattttcaggctcctccattaccatccgcctcatcttgatattgttccatggacattaaatgagaccttttctgctat

SEQ ID NO: 193727 - DNA, 78 bp, Homo sapiens
tcctccattaccatccgcctcatcttgatattgttccatggacattaaatgagaccttttctgctattcaggaaataa

SEQ ID NO: 193728 - DNA, 76 bp, Homo sapiens
ttaccatccgcctcatcttgatattgttccatggacattaaatgagaccttttctgctattcaggaaataacccag

SEQ ID NO: 193729 - DNA, 76 bp, Homo sapiens
atcttgatattgttccatggacattaaatgagaccttttctgctattcaggaaataacccagttctgcaccactgg

SEQ ID NO: 193730 - DNA, 73 bp, Homo sapiens
atattgttccatggacattaaatgagaccttttctgctattcaggaaataacccagttctgcaccactggttt

SEQ ID NO: 193731 - DNA, 74 bp, Homo sapiens
cattaaatgagaccttttctgctattcaggaaataacccagttctgcaccactggtttttgtagctatctcgta

SEQ ID NO: 193732 - DNA, 73 bp, Homo sapiens
aatgagaccttttctgctattcaggaaataacccagttctgcaccactggtttttgtagctatctcgtaaggc

SEQ ID NO: 193733 - DNA, 76 bp, Homo sapiens
tttctgctattcaggaaataacccagttctgcaccactggtttttgtagctatctcgtaaggctgctggctgaaaa

SEQ ID NO: 193734 - DNA, 76 bp, Homo sapiens
aaataacccagttctgcaccactggtttttgtagctatctcgtaaggctgctggctgaaaactgtgtctatgcaac

SEQ ID NO: 193735 - DNA, 77 bp, Homo sapiens
ccagttctgcaccactggtttttgtagctatctcgtaaggctgctggctgaaaactgtgtctatgcaaccttccaag

SEQ ID NO: 193736 - DNA, 77 bp, Homo sapiens
actggtttttgtagctatctcgtaaggctgctggctgaaaactgtgtctatgcaaccttccaagtgcggagtgtcaa

SEQ ID NO: 193737 - DNA, 77 bp, Homo sapiens
tttttgtagctatctcgtaaggctgctggctgaaaactgtgtctatgcaaccttccaagtgcggagtgtcaaccaac

SEQ ID NO: 193738 - DNA, 78 bp, Homo sapiens
tatctcgtaaggctgctggctgaaaactgtgtctatgcaaccttccaagtgcggagtgtcaaccaactggacgggaga

SEQ ID NO: 193739 - DNA, 77 bp, Homo sapiens
ctggctgaaaactgtgtctatgcaaccttccaagtgcggagtgtcaaccaactggacgggagagagtactgctccta

SEQ ID NO: 193740 - DNA, 75 bp, Homo sapiens
aaaactgtgtctatgcaaccttccaagtgcggagtgtcaaccaactggacgggagagagtactgctcctactcca

SEQ ID NO: 193741 - DNA, 77 bp, Homo sapiens
tatgcaaccttccaagtgcggagtgtcaaccaactggacgggagagagtactgctcctactccaggactctcacaaa

SEQ ID NO: 193742 - DNA, 78 bp, Homo sapiens
ccttccaagtgcggagtgtcaaccaactggacgggagagagtactgctcctactccaggactctcacaaagctgatga

SEQ ID NO: 193743 - DNA, 79 bp, Homo sapiens
agtgtcaaccaactggacgggagagagtactgctcctactccaggactctcacaaagctgatgagctgtacttcagaaa

SEQ ID NO: 193744 - DNA, 76 bp, Homo sapiens
aaccaactggacgggagagagtactgctcctactccaggactctcacaaagctgatgagctgtacttcagaaaaaa

SEQ ID NO: 193745 - DNA, 73 bp, Homo sapiens
aaaaaaataataatttccatgttttgtatatatctgacaaaactggcaacatcttacagactactgacttgaa

SEQ ID NO: 193746 - DNA, 75 bp, Homo sapiens
taatttccatgttttgtatatatctgacaaaactggcaacatcttacagactactgacttgaagacaacctcttt

SEQ ID NO: 193747 - DNA, 75 bp, Homo sapiens
gttttgtatatatctgacaaaactggcaacatcttacagactactgacttgaagacaacctcttttatatttctc

SEQ ID NO: 193748 - DNA, 76 bp, Homo sapiens
tatatctgacaaaactggcaacatcttacagactactgacttgaagacaacctcttttatatttctctatttctgg

SEQ ID NO: 193749 - DNA, 75 bp, Homo sapiens
aactggcaacatcttacagactactgacttgaagacaacctcttttatatttctctatttctgggctgatgaatt

SEQ ID NO: 193750 - DNA, 75 bp, Homo sapiens
gcaacatcttacagactactgacttgaagacaacctcttttatatttctctatttctgggctgatgaatttgttt

SEQ ID NO: 193751 - DNA, 75 bp, Homo sapiens
acagactactgacttgaagacaacctcttttatatttctctatttctgggctgatgaatttgttttcatctgtct

SEQ ID NO: 193752 - DNA, 71 bp, Homo sapiens
acttgaagacaacctcttttatatttctctatttctgggctgatgaatttgttttcatctgtcttttcccc

SEQ ID NO: 193753 - DNA, 71 bp, Homo sapiens
caacctcttttatatttctctatttctgggctgatgaatttgttttcatctgtcttttcccccttcagaat

SEQ ID NO: 193754 - DNA, 70 bp, Homo sapiens
atttctctatttctgggctgatgaatttgttttcatctgtcttttcccccttcagaattttccttggaaa

SEQ ID NO: 193755 - DNA, 68 bp, Homo sapiens
ttctgggctgatgaatttgttttcatctgtcttttcccccttcagaattttccttggaaaaaaaatac

SEQ ID NO: 193756 - DNA, 67 bp, Homo sapiens
gaatttgttttcatctgtcttttcccccttcagaattttccttggaaaaaaaatactagcctagctg

SEQ ID NO: 193757 - DNA, 68 bp, Homo sapiens
tgttttcatctgtcttttcccccttcagaattttccttggaaaaaaaatactagcctagctggtcatt

SEQ ID NO: 193758 - DNA, 68 bp, Homo sapiens
ttcatctgtcttttcccccttcagaattttccttggaaaaaaaatactagcctagctggtcatttctt

SEQ ID NO: 193759 - DNA, 68 bp, Homo sapiens
tctgtcttttcccccttcagaattttccttggaaaaaaaatactagcctagctggtcatttctttgta

SEQ ID NO: 193760 - DNA, 68 bp, Homo sapiens
cccttcagaattttccttggaaaaaaaatactagcctagctggtcatttctttgtaaggtagttagca

SEQ ID NO: 193761 - DNA, 67 bp, Homo sapiens
cagaattttccttggaaaaaaaatactagcctagctggtcatttctttgtaaggtagttagcaattt

SEQ ID NO: 193762 - DNA, 68 bp, Homo sapiens
aaaatactagcctagctggtcatttctttgtaaggtagttagcaattttaagtctttctttggtcaac

SEQ ID NO: 193763 - DNA, 68 bp, Homo sapiens
aaatactagcctagctggtcatttctttgtaaggtagttagcaattttaagtctttctttggtcaact

SEQ ID NO: 193764 - DNA, 66 bp, Homo sapiens
ctagctggtcatttctttgtaaggtagttagcaattttaagtctttctttggtcaactttttttta

SEQ ID NO: 193765 - DNA, 64 bp, Homo sapiens
ttctttgtaaggtagttagcaattttaagtctttctttggtcaacttttttttaatgtgaaaag

SEQ ID NO: 193766 - DNA, 63 bp, Homo sapiens
gcaattttaagtctttctttggtcaacttttttttaatgtgaaaagttaggtaagacactttt

SEQ ID NO: 193767 - DNA, 63 bp, Homo sapiens
gtctttctttggtcaacttttttttaatgtgaaaagttaggtaagacacttttttactgcttt

SEQ ID NO: 193768 - DNA, 63 bp, Homo sapiens
ggtcaacttttttttaatgtgaaaagttaggtaagacacttttttactgcttttatgtttttc

SEQ ID NO: 193769 - DNA, 69 bp, Homo sapiens
aatgtgaaaagttaggtaagacacttttttactgcttttatgtttttctgtcttgttttgagaccatga

SEQ ID NO: 193770 - DNA, 69 bp, Homo sapiens
agttaggtaagacacttttttactgcttttatgtttttctgtcttgttttgagaccatgatggttacac

SEQ ID NO: 193771 - DNA, 69 bp, Homo sapiens
gacacttttttactgcttttatgtttttctgtcttgttttgagaccatgatggttacacttttggttcc

SEQ ID NO: 193772 - DNA, 69 bp, Homo sapiens
ttactgcttttatgtttttctgtcttgttttgagaccatgatggttacacttttggttcctaaataaaa

SEQ ID NO: 193773 - DNA, 67 bp, Homo sapiens
ttttatgtttttctgtcttgttttgagaccatgatggttacacttttggttcctaaataaaatttaa

SEQ ID NO: 193774 - DNA, 70 bp, Homo sapiens
aatttaaaaaattaacagccaagtcacaaaggtaatggattgcacatagactaaggaataaacttcagat

SEQ ID NO: 193775 - DNA, 73 bp, Homo sapiens
aattaacagccaagtcacaaaggtaatggattgcacatagactaaggaataaacttcagatttgtgatttttg

SEQ ID NO: 193776 - DNA, 74 bp, Homo sapiens
cagccaagtcacaaaggtaatggattgcacatagactaaggaataaacttcagatttgtgatttttgtttctaa

SEQ ID NO: 193777 - DNA, 74 bp, Homo sapiens
tgcacatagactaaggaataaacttcagatttgtgatttttgtttctaatcttgatgtaaatttacactattta

SEQ ID NO: 193778 - DNA, 71 bp, Homo sapiens
atagactaaggaataaacttcagatttgtgatttttgtttctaatcttgatgtaaatttacactatttata

SEQ ID NO: 193779 - DNA, 71 bp, Homo sapiens
gaataaacttcagatttgtgatttttgtttctaatcttgatgtaaatttacactatttataaatacatatt

SEQ ID NO: 193780 - DNA, 74 bp, Homo sapiens
tgtttctaatcttgatgtaaatttacactatttataaatacatatttattgcttgaaaatatttgtgaatggaa

SEQ ID NO: 193781 - DNA, 75 bp, Homo sapiens
ctaatcttgatgtaaatttacactatttataaatacatatttattgcttgaaaatatttgtgaatggaatgctgt

SEQ ID NO: 193782 - DNA, 72 bp, Homo sapiens
tgtaaatttacactatttataaatacatatttattgcttgaaaatatttgtgaatggaatgctgttattttt

SEQ ID NO: 193783 - DNA, 74 bp, Homo sapiens
tttataaatacatatttattgcttgaaaatatttgtgaatggaatgctgttattttttccagatttacctgcca

SEQ ID NO: 193784 - DNA, 71 bp, Homo sapiens
gcttgaaaatatttgtgaatggaatgctgttattttttccagatttacctgccattgaaattttaaggagt

SEQ ID NO: 193785 - DNA, 71 bp, Homo sapiens
tatttgtgaatggaatgctgttattttttccagatttacctgccattgaaattttaaggagttctgtaatt

SEQ ID NO: 193786 - DNA, 71 bp, Homo sapiens
gaatggaatgctgttattttttccagatttacctgccattgaaattttaaggagttctgtaatttcaaaca

SEQ ID NO: 193787 - DNA, 69 bp, Homo sapiens
gctgttattttttccagatttacctgccattgaaattttaaggagttctgtaatttcaaacactactcc

SEQ ID NO: 193788 - DNA, 70 bp, Homo sapiens
ttccagatttacctgccattgaaattttaaggagttctgtaatttcaaacactactcctattacattttc

SEQ ID NO: 193789 - DNA, 71 bp, Homo sapiens
tacctgccattgaaattttaaggagttctgtaatttcaaacactactcctattacattttctatgtgtaaa

SEQ ID NO: 193790 - DNA, 70 bp, Homo sapiens
gccattgaaattttaaggagttctgtaatttcaaacactactcctattacattttctatgtgtaaataaa

SEQ ID NO: 193791 - DNA, 71 bp, Homo sapiens
ttttaaggagttctgtaatttcaaacactactcctattacattttctatgtgtaaataaaactgcttagca

SEQ ID NO: 193792 - DNA, 73 bp, Homo sapiens
aggagttctgtaatttcaaacactactcctattacattttctatgtgtaaataaaactgcttagcattgtaca

SEQ ID NO: 193793 - DNA, 74 bp, Homo sapiens
ggagttctgtaatttcaaacactactcctattacattttctatgtgtaaataaaactgcttagcattgtacaga

SEQ ID NO: 193794 - DNA, 73 bp, Homo sapiens
tctgtaatttcaaacactactcctattacattttctatgtgtaaataaaactgcttagcattgtacagaaact

SEQ ID NO: 193795 - DNA, 70 bp, Homo sapiens
aatttcaaacactactcctattacattttctatgtgtaaataaaactgcttagcattgtacagaaacttt

SEQ ID NO: 193796 - DNA, 72 bp, Homo sapiens
tcaaacactactcctattacattttctatgtgtaaataaaactgcttagcattgtacagaaacttttattaa

SEQ ID NO: 193797 - DNA, 70 bp, Homo sapiens
cactactcctattacattttctatgtgtaaataaaactgcttagcattgtacagaaacttttattaaaat

SEQ ID NO: 193798 - DNA, 69 bp, Homo sapiens
ctcctattacattttctatgtgtaaataaaactgcttagcattgtacagaaacttttattaaaattgtt

SEQ ID NO: 193799 - DNA, 69 bp, Homo sapiens
attacattttctatgtgtaaataaaactgcttagcattgtacagaaacttttattaaaattgtttaatg

SEQ ID NO: 193800 - DNA, 69 bp, Homo sapiens
tctatgtgtaaataaaactgcttagcattgtacagaaacttttattaaaattgtttaatgtttaaagag

SEQ ID NO: 193801 - DNA, 66 bp, Homo sapiens
aataaaactgcttagcattgtacagaaacttttattaaaattgtttaatgtttaaagagttttcta

SEQ ID NO: 193802 - DNA, 68 bp, Homo sapiens
ctgcttagcattgtacagaaacttttattaaaattgtttaatgtttaaagagttttctattgtttgag

SEQ ID NO: 193803 - DNA, 64 bp, Homo sapiens
attgtacagaaacttttattaaaattgtttaatgtttaaagagttttctattgtttgagtttta

SEQ ID NO: 193804 - DNA, 61 bp, Homo sapiens
cttttattaaaattgtttaatgtttaaagagttttctattgtttgagttttaaaaaagact

SEQ ID NO: 193805 - DNA, 66 bp, Homo sapiens
tgtttaatgtttaaagagttttctattgtttgagttttaaaaaagactttatgtacagtgcccagt

SEQ ID NO: 193806 - DNA, 66 bp, Homo sapiens
ttaaagagttttctattgtttgagttttaaaaaagactttatgtacagtgcccagtttttgttcat

SEQ ID NO: 193807 - DNA, 67 bp, Homo sapiens
gagttttctattgtttgagttttaaaaaagactttatgtacagtgcccagtttttgttcatttttga

SEQ ID NO: 193808 - DNA, 70 bp, Homo sapiens
tgtttgagttttaaaaaagactttatgtacagtgcccagtttttgttcatttttgaaatctgattatata

SEQ ID NO: 193809 - DNA, 71 bp, Homo sapiens
taatatatatagaaatctggatatatatgtataaatctttagaacttaaatttttctcgttttaagtttca

SEQ ID NO: 193810 - DNA, 71 bp, Homo sapiens
tagaaatctggatatatatgtataaatctttagaacttaaatttttctcgttttaagtttcacatctatgg

SEQ ID NO: 193811 - DNA, 71 bp, Homo sapiens
tctggatatatatgtataaatctttagaacttaaatttttctcgttttaagtttcacatctatggtagatt

SEQ ID NO: 193812 - DNA, 67 bp, Homo sapiens
ataaatctttagaacttaaatttttctcgttttaagtttcacatctatggtagatttttgaggtgtc

SEQ ID NO: 193813 - DNA, 67 bp, Homo sapiens
agaacttaaatttttctcgttttaagtttcacatctatggtagatttttgaggtgtctactgtaaag

SEQ ID NO: 193814 - DNA, 70 bp, Homo sapiens
aatttttctcgttttaagtttcacatctatggtagatttttgaggtgtctactgtaaagtattgcttaca

SEQ ID NO: 193815 - DNA, 70 bp, Homo sapiens
ctcgttttaagtttcacatctatggtagatttttgaggtgtctactgtaaagtattgcttacaaaaagta

SEQ ID NO: 193816 - DNA, 72 bp, Homo sapiens
gtttcacatctatggtagatttttgaggtgtctactgtaaagtattgcttacaaaaagtatgattattttta

SEQ ID NO: 193817 - DNA, 70 bp, Homo sapiens
tatggtagatttttgaggtgtctactgtaaagtattgcttacaaaaagtatgattatttttaaagaaata

SEQ ID NO: 193818 - DNA, 72 bp, Homo sapiens
gaggtgtctactgtaaagtattgcttacaaaaagtatgattatttttaaagaaatatatatggtatgtatcc

SEQ ID NO: 193819 - DNA, 73 bp, Homo sapiens
tctactgtaaagtattgcttacaaaaagtatgattatttttaaagaaatatatatggtatgtatcctcaagac

SEQ ID NO: 193820 - DNA, 74 bp, Homo sapiens
tgcttacaaaaagtatgattatttttaaagaaatatatatggtatgtatcctcaagacctaaaatgtcagactg

SEQ ID NO: 193821 - DNA, 72 bp, Homo sapiens
aagtatgattatttttaaagaaatatatatggtatgtatcctcaagacctaaaatgtcagactggtttattg

SEQ ID NO: 193822 - DNA, 72 bp, Homo sapiens
atttttaaagaaatatatatggtatgtatcctcaagacctaaaatgtcagactggtttattgttaagttgca

SEQ ID NO: 193823 - DNA, 78 bp, Homo sapiens
gaaatatatatggtatgtatcctcaagacctaaaatgtcagactggtttattgttaagttgcaattactgcaatgaca

SEQ ID NO: 193824 - DNA, 78 bp, Homo sapiens
tatatggtatgtatcctcaagacctaaaatgtcagactggtttattgttaagttgcaattactgcaatgacagaccaa

SEQ ID NO: 193825 - DNA, 75 bp, Homo sapiens
acctaaaatgtcagactggtttattgttaagttgcaattactgcaatgacagaccaataaacaattgctgccaaa

SEQ ID NO: 193826 - DNA, 77 bp, Homo sapiens
gtcagactggtttattgttaagttgcaattactgcaatgacagaccaataaacaattgctgccaaaatgtagtataa

SEQ ID NO: 193827 - DNA, 77 bp, Homo sapiens
tattgttaagttgcaattactgcaatgacagaccaataaacaattgctgccaaaatgtagtataatagtagaaaaca

SEQ ID NO: 193828 - DNA, 74 bp, Homo sapiens
agggaggaagggagcctcaaaggccaaggccagccaggacaccccctgggatcacactgagcttgccacatccc

SEQ ID NO: 193829 - DNA, 74 bp, Homo sapiens
aagggagcctcaaaggccaaggccagccaggacaccccctgggatcacactgagcttgccacatccccaaggcg

SEQ ID NO: 193830 - DNA, 72 bp, Homo sapiens
aaaggccaaggccagccaggacaccccctgggatcacactgagcttgccacatccccaaggcggccgaaccc

SEQ ID NO: 193831 - DNA, 74 bp, Homo sapiens
agccaggacaccccctgggatcacactgagcttgccacatccccaaggcggccgaaccctccgcaaccaccagc

SEQ ID NO: 193832 - DNA, 74 bp, Homo sapiens
cccctgggatcacactgagcttgccacatccccaaggcggccgaaccctccgcaaccaccagcccaggtcagtc

SEQ ID NO: 193833 - DNA, 76 bp, Homo sapiens
gggatcacactgagcttgccacatccccaaggcggccgaaccctccgcaaccaccagcccaggtcagtctcagccc

SEQ ID NO: 193834 - DNA, 76 bp, Homo sapiens
tgagcttgccacatccccaaggcggccgaaccctccgcaaccaccagcccaggtcagtctcagcccccagagagcc

SEQ ID NO: 193835 - DNA, 70 bp, Homo sapiens
cccaaggcggccgaaccctccgcaaccaccagcccaggtcagtctcagcccccagagagcccccaccaag

SEQ ID NO: 193836 - DNA, 70 bp, Homo sapiens
ccgaaccctccgcaaccaccagcccaggtcagtctcagcccccagagagcccccaccaaggcaaccctgg

SEQ ID NO: 193837 - DNA, 74 bp, Homo sapiens
atgtggggtggaaggatttctgtgtctgaggaccccttctgtcctcgcaggttaatccccagaggctccatgga

SEQ ID NO: 193838 - DNA, 73 bp, Homo sapiens
aaggatttctgtgtctgaggaccccttctgtcctcgcaggttaatccccagaggctccatggagttccctggc

SEQ ID NO: 193839 - DNA, 73 bp, Homo sapiens
ctgtgtctgaggaccccttctgtcctcgcaggttaatccccagaggctccatggagttccctggcctggggtc

SEQ ID NO: 193840 - DNA, 69 bp, Homo sapiens
ggaccccttctgtcctcgcaggttaatccccagaggctccatggagttccctggcctggggtccctggg

SEQ ID NO: 193841 - DNA, 72 bp, Homo sapiens
tgtcctcgcaggttaatccccagaggctccatggagttccctggcctggggtccctggggacctcagagccc

SEQ ID NO: 193842 - DNA, 68 bp, Homo sapiens
ggttaatccccagaggctccatggagttccctggcctggggtccctggggacctcagagcccctcccc

SEQ ID NO: 193843 - DNA, 70 bp, Homo sapiens
agaggctccatggagttccctggcctggggtccctggggacctcagagcccctcccccagtttgtggatc

SEQ ID NO: 193844 - DNA, 70 bp, Homo sapiens
atggagttccctggcctggggtccctggggacctcagagcccctcccccagtttgtggatcctgctctgg

SEQ ID NO: 193845 - DNA, 72 bp, Homo sapiens
ctggggtccctggggacctcagagcccctcccccagtttgtggatcctgctctggtgtcctccacaccagaa

SEQ ID NO: 193846 - DNA, 73 bp, Homo sapiens
gtccctggggacctcagagcccctcccccagtttgtggatcctgctctggtgtcctccacaccagaatcaggg

SEQ ID NO: 193847 - DNA, 72 bp, Homo sapiens
acctcagagcccctcccccagtttgtggatcctgctctggtgtcctccacaccagaatcaggggttttcttc

SEQ ID NO: 193848 - DNA, 72 bp, Homo sapiens
ccccagtttgtggatcctgctctggtgtcctccacaccagaatcaggggttttcttcccctctgggcctgag

SEQ ID NO: 193849 - DNA, 74 bp, Homo sapiens
tttgtggatcctgctctggtgtcctccacaccagaatcaggggttttcttcccctctgggcctgagggcttgga

SEQ ID NO: 193850 - DNA, 77 bp, Homo sapiens
tctggtgtcctccacaccagaatcaggggttttcttcccctctgggcctgagggcttggatgcagcagcttcctcca

SEQ ID NO: 193851 - DNA, 77 bp, Homo sapiens
tgtcctccacaccagaatcaggggttttcttcccctctgggcctgagggcttggatgcagcagcttcctccactgcc

SEQ ID NO: 193852 - DNA, 76 bp, Homo sapiens
accagaatcaggggttttcttcccctctgggcctgagggcttggatgcagcagcttcctccactgccccgagcaca

SEQ ID NO: 193853 - DNA, 83 bp, Homo sapiens
ttttcttcccctctgggcctgagggcttggatgcagcagcttcctccactgccccgagcacagccaccgctgcagctgcggca

SEQ ID NO: 193854 - DNA, 86 bp, Homo sapiens
tctgggcctgagggcttggatgcagcagcttcctccactgccccgagcacagccaccgctgcagctgcggcactggcctactacag

SEQ ID NO: 193855 - DNA, 87 bp, Homo sapiens
tgagggcttggatgcagcagcttcctccactgccccgagcacagccaccgctgcagctgcggcactggcctactacagggacgctga

SEQ ID NO: 193856 - DNA, 86 bp, Homo sapiens
atgcagcagcttcctccactgccccgagcacagccaccgctgcagctgcggcactggcctactacagggacgctgaggcctacaga

SEQ ID NO: 193857 - DNA, 82 bp, Homo sapiens
ttcctccactgccccgagcacagccaccgctgcagctgcggcactggcctactacagggacgctgaggcctacagacactcc

SEQ ID NO: 193858 - DNA, 79 bp, Homo sapiens
ccccgagcacagccaccgctgcagctgcggcactggcctactacagggacgctgaggcctacagacactccccaggtaa

SEQ ID NO: 193859 - DNA, 80 bp, Homo sapiens
acagccaccgctgcagctgcggcactggcctactacagggacgctgaggcctacagacactccccaggtaactccattga

SEQ ID NO: 193860 - DNA, 81 bp, Homo sapiens
tgcagctgcggcactggcctactacagggacgctgaggcctacagacactccccaggtaactccattgagtggctgtcttg

SEQ ID NO: 193861 - DNA, 78 bp, Homo sapiens
ggcactggcctactacagggacgctgaggcctacagacactccccaggtaactccattgagtggctgtcttggcattg

SEQ ID NO: 193862 - DNA, 74 bp, Homo sapiens
tagactgattttgcctcttctttcctccatccctacctgcccccaacagtctttcaggtgtacccattgctcaa

SEQ ID NO: 193863 - DNA, 73 bp, Homo sapiens
ttttgcctcttctttcctccatccctacctgcccccaacagtctttcaggtgtacccattgctcaactgtatg

SEQ ID NO: 193864 - DNA, 74 bp, Homo sapiens
tacctgcccccaacagtctttcaggtgtacccattgctcaactgtatggaggggatcccagggggctcaccata

SEQ ID NO: 193865 - DNA, 75 bp, Homo sapiens
tctttcaggtgtacccattgctcaactgtatggaggggatcccagggggctcaccatatgccggctgggcctacg

SEQ ID NO: 193866 - DNA, 75 bp, Homo sapiens
tgtacccattgctcaactgtatggaggggatcccagggggctcaccatatgccggctgggcctacggcaagacgg

SEQ ID NO: 193867 - DNA, 71 bp, Homo sapiens
aactgtatggaggggatcccagggggctcaccatatgccggctgggcctacggcaagacggggctctaccc

SEQ ID NO: 193868 - DNA, 73 bp, Homo sapiens
agggggctcaccatatgccggctgggcctacggcaagacggggctctaccctgcctcaactgtgtgtcccacc

SEQ ID NO: 193869 - DNA, 73 bp, Homo sapiens
accatatgccggctgggcctacggcaagacggggctctaccctgcctcaactgtgtgtcccacccgcgaggac

SEQ ID NO: 193870 - DNA, 72 bp, Homo sapiens
ccggctgggcctacggcaagacggggctctaccctgcctcaactgtgtgtcccacccgcgaggactctcctc

SEQ ID NO: 193871 - DNA, 72 bp, Homo sapiens
tacggcaagacggggctctaccctgcctcaactgtgtgtcccacccgcgaggactctcctccccaggccgtg

SEQ ID NO: 193872 - DNA, 75 bp, Homo sapiens
ggctctaccctgcctcaactgtgtgtcccacccgcgaggactctcctccccaggccgtggaagatctggatggaa

SEQ ID NO: 193873 - DNA, 73 bp, Homo sapiens
taccctgcctcaactgtgtgtcccacccgcgaggactctcctccccaggccgtggaagatctggatggaaaag

SEQ ID NO: 193874 - DNA, 74 bp, Homo sapiens
aactgtgtgtcccacccgcgaggactctcctccccaggccgtggaagatctggatggaaaaggcagcaccagct

SEQ ID NO: 193875 - DNA, 73 bp, Homo sapiens
acccgcgaggactctcctccccaggccgtggaagatctggatggaaaaggcagcaccagcttcctggagactt

SEQ ID NO: 193876 - DNA, 76 bp, Homo sapiens
aggactctcctccccaggccgtggaagatctggatggaaaaggcagcaccagcttcctggagactttgaagacaga

SEQ ID NO: 193877 - DNA, 79 bp, Homo sapiens
cccaggccgtggaagatctggatggaaaaggcagcaccagcttcctggagactttgaagacagagcggctgagcccaga

SEQ ID NO: 193878 - DNA, 76 bp, Homo sapiens
atggaaaaggcagcaccagcttcctggagactttgaagacagagcggctgagcccagacctcctgaccctgggacc

SEQ ID NO: 193879 - DNA, 81 bp, Homo sapiens
agcaccagcttcctggagactttgaagacagagcggctgagcccagacctcctgaccctgggacctgcactgccttcatca

SEQ ID NO: 193880 - DNA, 79 bp, Homo sapiens
ttcctggagactttgaagacagagcggctgagcccagacctcctgaccctgggacctgcactgccttcatcactccctg

SEQ ID NO: 193881 - DNA, 78 bp, Homo sapiens
tttgaagacagagcggctgagcccagacctcctgaccctgggacctgcactgccttcatcactccctgtccccaatag

SEQ ID NO: 193882 - DNA, 79 bp, Homo sapiens
acagagcggctgagcccagacctcctgaccctgggacctgcactgccttcatcactccctgtccccaatagtgcttatg

SEQ ID NO: 193883 - DNA, 76 bp, Homo sapiens
gcccagacctcctgaccctgggacctgcactgccttcatcactccctgtccccaatagtgcttatgggggccctga

SEQ ID NO: 193884 - DNA, 75 bp, Homo sapiens
tcctgaccctgggacctgcactgccttcatcactccctgtccccaatagtgcttatgggggccctgacttttcca

SEQ ID NO: 193885 - DNA, 73 bp, Homo sapiens
ggacctgcactgccttcatcactccctgtccccaatagtgcttatgggggccctgacttttccagtaccttct

SEQ ID NO: 193886 - DNA, 67 bp, Homo sapiens
ctgtccccaatagtgcttatgggggccctgacttttccagtaccttcttttctcccaccgggagccc

SEQ ID NO: 193887 - DNA, 70 bp, Homo sapiens
tagtgcttatgggggccctgacttttccagtaccttcttttctcccaccgggagccccctcaattcagca

SEQ ID NO: 193888 - DNA, 69 bp, Homo sapiens
ccctgacttttccagtaccttcttttctcccaccgggagccccctcaattcagcagcctattcctctcc

SEQ ID NO: 193889 - DNA, 71 bp, Homo sapiens
ttcttttctcccaccgggagccccctcaattcagcagcctattcctctcccaagcttcgtggaactctccc

SEQ ID NO: 193890 - DNA, 73 bp, Homo sapiens
tctcccaccgggagccccctcaattcagcagcctattcctctcccaagcttcgtggaactctccccctgcctc

SEQ ID NO: 193891 - DNA, 73 bp, Homo sapiens
cccctcaattcagcagcctattcctctcccaagcttcgtggaactctccccctgcctccctgtggtgagaaat

SEQ ID NO: 193892 - DNA, 70 bp, Homo sapiens
tattcctctcccaagcttcgtggaactctccccctgcctccctgtggtgagaaattcaaaaaaggacagg

SEQ ID NO: 193893 - DNA, 68 bp, Homo sapiens
aagcttcgtggaactctccccctgcctccctgtggtgagaaattcaaaaaaggacagggaagttgagg

SEQ ID NO: 193894 - DNA, 77 bp, Homo sapiens
aagtaaagctgagctgagcctagctccctcttctcctctccaccccaccagaggccagggagtgtgtgaactgcgga

SEQ ID NO: 193895 - DNA, 79 bp, Homo sapiens
tgagcctagctccctcttctcctctccaccccaccagaggccagggagtgtgtgaactgcggagcaacagccactccac

SEQ ID NO: 193896 - DNA, 78 bp, Homo sapiens
tccctcttctcctctccaccccaccagaggccagggagtgtgtgaactgcggagcaacagccactccactgtggcgga

SEQ ID NO: 193897 - DNA, 78 bp, Homo sapiens
ctctccaccccaccagaggccagggagtgtgtgaactgcggagcaacagccactccactgtggcggagggacaggaca

SEQ ID NO: 193898 - DNA, 78 bp, Homo sapiens
caccagaggccagggagtgtgtgaactgcggagcaacagccactccactgtggcggagggacaggacaggccactacc

SEQ ID NO: 193899 - DNA, 79 bp, Homo sapiens
aggccagggagtgtgtgaactgcggagcaacagccactccactgtggcggagggacaggacaggccactacctatgcaa

SEQ ID NO: 193900 - DNA, 81 bp, Homo sapiens
tgtgaactgcggagcaacagccactccactgtggcggagggacaggacaggccactacctatgcaacgcctgcggcctcta

SEQ ID NO: 193901 - DNA, 82 bp, Homo sapiens
gagcaacagccactccactgtggcggagggacaggacaggccactacctatgcaacgcctgcggcctctatcacaagatgaa

SEQ ID NO: 193902 - DNA, 81 bp, Homo sapiens
cactccactgtggcggagggacaggacaggccactacctatgcaacgcctgcggcctctatcacaagatgaatgggcagaa

SEQ ID NO: 193903 - DNA, 80 bp, Homo sapiens
actgtggcggagggacaggacaggccactacctatgcaacgcctgcggcctctatcacaagatgaatgggcagaacaggc

SEQ ID NO: 193904 - DNA, 79 bp, Homo sapiens
agggacaggacaggccactacctatgcaacgcctgcggcctctatcacaagatgaatgggcagaacaggcccctcatcc

SEQ ID NO: 193905 - DNA, 78 bp, Homo sapiens
aggccactacctatgcaacgcctgcggcctctatcacaagatgaatgggcagaacaggcccctcatccggcccaagaa

SEQ ID NO: 193906 - DNA, 80 bp, Homo sapiens
tatgcaacgcctgcggcctctatcacaagatgaatgggcagaacaggcccctcatccggcccaagaagcgcctggtaaga

SEQ ID NO: 193907 - DNA, 78 bp, Homo sapiens
cctgcggcctctatcacaagatgaatgggcagaacaggcccctcatccggcccaagaagcgcctggtaagaccacaga

SEQ ID NO: 193908 - DNA, 79 bp, Homo sapiens
tctatcacaagatgaatgggcagaacaggcccctcatccggcccaagaagcgcctggtaagaccacagacctgcttcac

SEQ ID NO: 193909 - DNA, 76 bp, Homo sapiens
atgaatgggcagaacaggcccctcatccggcccaagaagcgcctggtaagaccacagacctgcttcaccttataca

SEQ ID NO: 193910 - DNA, 78 bp, Homo sapiens
acttccacatccccagggcactgatctcacatcctgtcgtcccctagattgtcagtaaacgggcaggtactcagtgca

SEQ ID NO: 193911 - DNA, 79 bp, Homo sapiens
cccagggcactgatctcacatcctgtcgtcccctagattgtcagtaaacgggcaggtactcagtgcaccaactgccaga

SEQ ID NO: 193912 - DNA, 78 bp, Homo sapiens
actgatctcacatcctgtcgtcccctagattgtcagtaaacgggcaggtactcagtgcaccaactgccagacgaccac

SEQ ID NO: 193913 - DNA, 76 bp, Homo sapiens
acatcctgtcgtcccctagattgtcagtaaacgggcaggtactcagtgcaccaactgccagacgaccaccacgaca

SEQ ID NO: 193914 - DNA, 76 bp, Homo sapiens
ccctagattgtcagtaaacgggcaggtactcagtgcaccaactgccagacgaccaccacgacactgtggcggagaa

SEQ ID NO: 193915 - DNA, 77 bp, Homo sapiens
attgtcagtaaacgggcaggtactcagtgcaccaactgccagacgaccaccacgacactgtggcggagaaatgccag

SEQ ID NO: 193916 - DNA, 76 bp, Homo sapiens
aaacgggcaggtactcagtgcaccaactgccagacgaccaccacgacactgtggcggagaaatgccagtggggatc

SEQ ID NO: 193917 - DNA, 80 bp, Homo sapiens
gtactcagtgcaccaactgccagacgaccaccacgacactgtggcggagaaatgccagtggggatcccgtgtgcaatgcc

SEQ ID NO: 193918 - DNA, 79 bp, Homo sapiens
actgccagacgaccaccacgacactgtggcggagaaatgccagtggggatcccgtgtgcaatgcctgcggcctctacta

SEQ ID NO: 193919 - DNA, 78 bp, Homo sapiens
acgaccaccacgacactgtggcggagaaatgccagtggggatcccgtgtgcaatgcctgcggcctctactacaagcta

SEQ ID NO: 193920 - DNA, 79 bp, Homo sapiens
acgacactgtggcggagaaatgccagtggggatcccgtgtgcaatgcctgcggcctctactacaagctacaccaggtga

SEQ ID NO: 193921 - DNA, 79 bp, Homo sapiens
gtggcggagaaatgccagtggggatcccgtgtgcaatgcctgcggcctctactacaagctacaccaggtgacgccctgc

SEQ ID NO: 193922 - DNA, 77 bp, Homo sapiens
aatgccagtggggatcccgtgtgcaatgcctgcggcctctactacaagctacaccaggtgacgccctgccccttgga

SEQ ID NO: 193923 - DNA, 77 bp, Homo sapiens
atcccgtgtgcaatgcctgcggcctctactacaagctacaccaggtgacgccctgccccttggagccacccctctgc

SEQ ID NO: 193924 - DNA, 72 bp, Homo sapiens
ggcaaaggtctggagttggggacacccgcagcctcctttttggcaggtgaaccggccactgaccatgcggaa

SEQ ID NO: 193925 - DNA, 74 bp, Homo sapiens
gacacccgcagcctcctttttggcaggtgaaccggccactgaccatgcggaaggatggtattcagactcgaaac

SEQ ID NO: 193926 - DNA, 74 bp, Homo sapiens
agcctcctttttggcaggtgaaccggccactgaccatgcggaaggatggtattcagactcgaaaccgcaaggca

SEQ ID NO: 193927 - DNA, 75 bp, Homo sapiens
tttttggcaggtgaaccggccactgaccatgcggaaggatggtattcagactcgaaaccgcaaggcatctggaaa

SEQ ID NO: 193928 - DNA, 73 bp, Homo sapiens
ggtgaaccggccactgaccatgcggaaggatggtattcagactcgaaaccgcaaggcatctggaaaagggaaa

SEQ ID NO: 193929 - DNA, 70 bp, Homo sapiens
actgaccatgcggaaggatggtattcagactcgaaaccgcaaggcatctggaaaagggaaaaagaaacgg

SEQ ID NO: 193930 - DNA, 69 bp, Homo sapiens
aaggatggtattcagactcgaaaccgcaaggcatctggaaaagggaaaaagaaacggggctccagtctg

SEQ ID NO: 193931 - DNA, 71 bp, Homo sapiens
tggtattcagactcgaaaccgcaaggcatctggaaaagggaaaaagaaacggggctccagtctgggaggca

SEQ ID NO: 193932 - DNA, 70 bp, Homo sapiens
aaaccgcaaggcatctggaaaagggaaaaagaaacggggctccagtctgggaggcacaggagcagccgaa

SEQ ID NO: 193933 - DNA, 71 bp, Homo sapiens
aaggcatctggaaaagggaaaaagaaacggggctccagtctgggaggcacaggagcagccgaaggaccagc

SEQ ID NO: 193934 - DNA, 71 bp, Homo sapiens
aagggaaaaagaaacggggctccagtctgggaggcacaggagcagccgaaggaccagctggtggctttatg

SEQ ID NO: 193935 - DNA, 77 bp, Homo sapiens
tccagtctgggaggcacaggagcagccgaaggaccagctggtggctttatggtggtggctgggggcagcggtagcgg

SEQ ID NO: 193936 - DNA, 76 bp, Homo sapiens
gaggcacaggagcagccgaaggaccagctggtggctttatggtggtggctgggggcagcggtagcgggaattgtgg

SEQ ID NO: 193937 - DNA, 74 bp, Homo sapiens
acaggagcagccgaaggaccagctggtggctttatggtggtggctgggggcagcggtagcgggaattgtgggga

SEQ ID NO: 193938 - DNA, 72 bp, Homo sapiens
aaggaccagctggtggctttatggtggtggctgggggcagcggtagcgggaattgtggggaggtggcttcag

SEQ ID NO: 193939 - DNA, 74 bp, Homo sapiens
ctggtggctttatggtggtggctgggggcagcggtagcgggaattgtggggaggtggcttcaggcctgacactg

SEQ ID NO: 193940 - DNA, 72 bp, Homo sapiens
tttatggtggtggctgggggcagcggtagcgggaattgtggggaggtggcttcaggcctgacactgggcccc

SEQ ID NO: 193941 - DNA, 72 bp, Homo sapiens
tgggggcagcggtagcgggaattgtggggaggtggcttcaggcctgacactgggccccccaggtactgccca

SEQ ID NO: 193942 - DNA, 72 bp, Homo sapiens
agcggtagcgggaattgtggggaggtggcttcaggcctgacactgggccccccaggtactgcccatctctac

SEQ ID NO: 193943 - DNA, 72 bp, Homo sapiens
aattgtggggaggtggcttcaggcctgacactgggccccccaggtactgcccatctctaccaaggcctgggc

SEQ ID NO: 193944 - DNA, 74 bp, Homo sapiens
aggtggcttcaggcctgacactgggccccccaggtactgcccatctctaccaaggcctgggccctgtggtgctg

SEQ ID NO: 193945 - DNA, 75 bp, Homo sapiens
gcctgacactgggccccccaggtactgcccatctctaccaaggcctgggccctgtggtgctgtcagggcctgtta

SEQ ID NO: 193946 - DNA, 74 bp, Homo sapiens
acactgggccccccaggtactgcccatctctaccaaggcctgggccctgtggtgctgtcagggcctgttagcca

SEQ ID NO: 193947 - DNA, 75 bp, Homo sapiens
aggtactgcccatctctaccaaggcctgggccctgtggtgctgtcagggcctgttagccacctcatgcctttccc

SEQ ID NO: 193948 - DNA, 74 bp, Homo sapiens
cccatctctaccaaggcctgggccctgtggtgctgtcagggcctgttagccacctcatgcctttccctggaccc

SEQ ID NO: 193949 - DNA, 74 bp, Homo sapiens
aaggcctgggccctgtggtgctgtcagggcctgttagccacctcatgcctttccctggacccctactgggctca

SEQ ID NO: 193950 - DNA, 74 bp, Homo sapiens
cctgtggtgctgtcagggcctgttagccacctcatgcctttccctggacccctactgggctcacccacgggctc

SEQ ID NO: 193951 - DNA, 71 bp, Homo sapiens
ctgtcagggcctgttagccacctcatgcctttccctggacccctactgggctcacccacgggctccttccc

SEQ ID NO: 193952 - DNA, 70 bp, Homo sapiens
gggcctgttagccacctcatgcctttccctggacccctactgggctcacccacgggctccttccccacag

SEQ ID NO: 193953 - DNA, 70 bp, Homo sapiens
ccacctcatgcctttccctggacccctactgggctcacccacgggctccttccccacaggccccatgccc

SEQ ID NO: 193954 - DNA, 68 bp, Homo sapiens
tttccctggacccctactgggctcacccacgggctccttccccacaggccccatgccccccaccacca

SEQ ID NO: 193955 - DNA, 71 bp, Homo sapiens
ccctactgggctcacccacgggctccttccccacaggccccatgccccccaccaccagcactactgtggtg

SEQ ID NO: 193956 - DNA, 78 bp, Homo sapiens
tcacccacgggctccttccccacaggccccatgccccccaccaccagcactactgtggtggctccgctcagctcatga

SEQ ID NO: 193957 - DNA, 82 bp, Homo sapiens
gctccttccccacaggccccatgccccccaccaccagcactactgtggtggctccgctcagctcatgagggcacagagcatg

SEQ ID NO: 193958 - DNA, 84 bp, Homo sapiens
cacaggccccatgccccccaccaccagcactactgtggtggctccgctcagctcatgagggcacagagcatggcctccagagga

SEQ ID NO: 193959 - DNA, 81 bp, Homo sapiens
atgccccccaccaccagcactactgtggtggctccgctcagctcatgagggcacagagcatggcctccagaggaggggtgg

SEQ ID NO: 193960 - DNA, 82 bp, Homo sapiens
accaccagcactactgtggtggctccgctcagctcatgagggcacagagcatggcctccagaggaggggtggtgtccttctc

SEQ ID NO: 193961 - DNA, 81 bp, Homo sapiens
actactgtggtggctccgctcagctcatgagggcacagagcatggcctccagaggaggggtggtgtccttctcctcttgta

SEQ ID NO: 193962 - DNA, 83 bp, Homo sapiens
tggctccgctcagctcatgagggcacagagcatggcctccagaggaggggtggtgtccttctcctcttgtagccagaattctg

SEQ ID NO: 193963 - DNA, 79 bp, Homo sapiens
agctcatgagggcacagagcatggcctccagaggaggggtggtgtccttctcctcttgtagccagaattctggacaacc

SEQ ID NO: 193964 - DNA, 73 bp, Homo sapiens
atggcctccagaggaggggtggtgtccttctcctcttgtagccagaattctggacaacccaagtctctgggcc

SEQ ID NO: 193965 - DNA, 73 bp, Homo sapiens
gtgtccttctcctcttgtagccagaattctggacaacccaagtctctgggccccaggcaccccctggcttgaa

SEQ ID NO: 193966 - DNA, 72 bp, Homo sapiens
tcctcttgtagccagaattctggacaacccaagtctctgggccccaggcaccccctggcttgaaccttcaaa

SEQ ID NO: 193967 - DNA, 65 bp, Homo sapiens
ccccaggcaccccctggcttgaaccttcaaagcttttgtaaaataaaaccaccaaagtcctgaaa

SEQ ID NO: 193968 - DNA, 66 bp, Homo sapiens
cccctggcttgaaccttcaaagcttttgtaaaataaaaccaccaaagtcctgaaattgtgggtgtg

SEQ ID NO: 193969 - DNA, 74 bp, Homo sapiens
ttcaaagcttttgtaaaataaaaccaccaaagtcctgaaattgtgggtgtgtctatgtgtggctgaacagcaga

SEQ ID NO: 193970 - DNA, 72 bp, Homo sapiens
tgttaaccttttagattccaaggaacaaagacacacacaggttagtgatggggatttattaaagcattcaca

SEQ ID NO: 193971 - DNA, 72 bp, Homo sapiens
ttagattccaaggaacaaagacacacacaggttagtgatggggatttattaaagcattcacagggaaataag

SEQ ID NO: 193972 - DNA, 72 bp, Homo sapiens
aacaaagacacacacaggttagtgatggggatttattaaagcattcacagggaaataaggaagacaagaaca

SEQ ID NO: 193973 - DNA, 74 bp, Homo sapiens
acacacacaggttagtgatggggatttattaaagcattcacagggaaataaggaagacaagaacagctacacag

SEQ ID NO: 193974 - DNA, 77 bp, Homo sapiens
ttagtgatggggatttattaaagcattcacagggaaataaggaagacaagaacagctacacaggcagcctcatggaa

SEQ ID NO: 193975 - DNA, 75 bp, Homo sapiens
tttattaaagcattcacagggaaataaggaagacaagaacagctacacaggcagcctcatggaagaacagaaact

SEQ ID NO: 193976 - DNA, 75 bp, Homo sapiens
aaagcattcacagggaaataaggaagacaagaacagctacacaggcagcctcatggaagaacagaaacttgaaaa

SEQ ID NO: 193977 - DNA, 76 bp, Homo sapiens
aaataaggaagacaagaacagctacacaggcagcctcatggaagaacagaaacttgaaaatggttcatgatccaaa

SEQ ID NO: 193978 - DNA, 80 bp, Homo sapiens
aggaagacaagaacagctacacaggcagcctcatggaagaacagaaacttgaaaatggttcatgatccaaagcagctcta

SEQ ID NO: 193979 - DNA, 81 bp, Homo sapiens
agctacacaggcagcctcatggaagaacagaaacttgaaaatggttcatgatccaaagcagctctagagcctggcttatct

SEQ ID NO: 193980 - DNA, 81 bp, Homo sapiens
acaggcagcctcatggaagaacagaaacttgaaaatggttcatgatccaaagcagctctagagcctggcttatcttgtcac

SEQ ID NO: 193981 - DNA, 78 bp, Homo sapiens
atggaagaacagaaacttgaaaatggttcatgatccaaagcagctctagagcctggcttatcttgtcaccccctcagc

SEQ ID NO: 193982 - DNA, 81 bp, Homo sapiens
agaaacttgaaaatggttcatgatccaaagcagctctagagcctggcttatcttgtcaccccctcagctgcaggcatctgt

SEQ ID NO: 193983 - DNA, 84 bp, Homo sapiens
atgatccaaagcagctctagagcctggcttatcttgtcaccccctcagctgcaggcatctgttgctcccttctctagtgcttcc

SEQ ID NO: 193984 - DNA, 81 bp, Homo sapiens
ctctagagcctggcttatcttgtcaccccctcagctgcaggcatctgttgctcccttctctagtgcttcccaaattggtga

SEQ ID NO: 193985 - DNA, 80 bp, Homo sapiens
ctggcttatcttgtcaccccctcagctgcaggcatctgttgctcccttctctagtgcttcccaaattggtgactcaactc

SEQ ID NO: 193986 - DNA, 79 bp, Homo sapiens
tatcttgtcaccccctcagctgcaggcatctgttgctcccttctctagtgcttcccaaattggtgactcaactcctttc

SEQ ID NO: 193987 - DNA, 81 bp, Homo sapiens
tcagctgcaggcatctgttgctcccttctctagtgcttcccaaattggtgactcaactcctttctggctgtatttatactc

SEQ ID NO: 193988 - DNA, 77 bp, Homo sapiens
gcatctgttgctcccttctctagtgcttcccaaattggtgactcaactcctttctggctgtatttatactcctccta

SEQ ID NO: 193989 - DNA, 76 bp, Homo sapiens
ttgctcccttctctagtgcttcccaaattggtgactcaactcctttctggctgtatttatactcctcctactgcta

SEQ ID NO: 193990 - DNA, 75 bp, Homo sapiens
tagtgcttcccaaattggtgactcaactcctttctggctgtatttatactcctcctactgctactgactaacttc

SEQ ID NO: 193991 - DNA, 73 bp, Homo sapiens
ttcccaaattggtgactcaactcctttctggctgtatttatactcctcctactgctactgactaacttctttc

SEQ ID NO: 193992 - DNA, 74 bp, Homo sapiens
actcaactcctttctggctgtatttatactcctcctactgctactgactaacttctttctgcccccctcgatgc

SEQ ID NO: 193993 - DNA, 76 bp, Homo sapiens
tttctggctgtatttatactcctcctactgctactgactaacttctttctgcccccctcgatgctagcccatggct

SEQ ID NO: 193994 - DNA, 74 bp, Homo sapiens
ctgtatttatactcctcctactgctactgactaacttctttctgcccccctcgatgctagcccatggctttttc

SEQ ID NO: 193995 - DNA, 76 bp, Homo sapiens
atactcctcctactgctactgactaacttctttctgcccccctcgatgctagcccatggctttttctgcctcatgg

SEQ ID NO: 193996 - DNA, 80 bp, Homo sapiens
tactgctactgactaacttctttctgcccccctcgatgctagcccatggctttttctgcctcatgggtcctgcagcttca

SEQ ID NO: 193997 - DNA, 77 bp, Homo sapiens
actaacttctttctgcccccctcgatgctagcccatggctttttctgcctcatgggtcctgcagcttcatggctccc

SEQ ID NO: 193998 - DNA, 79 bp, Homo sapiens
tttctgcccccctcgatgctagcccatggctttttctgcctcatgggtcctgcagcttcatggctcccggcgcttcagt

SEQ ID NO: 193999 - DNA, 80 bp, Homo sapiens
tttttctgcctcatgggtcctgcagcttcatggctcccggcgcttcagttcctattaatccatggcttttctgcattgta

SEQ ID NO: 194000 - DNA, 82 bp, Homo sapiens
atgggtcctgcagcttcatggctcccggcgcttcagttcctattaatccatggcttttctgcattgtagctcctgctgcctc

SEQ ID NO: 194001 - DNA, 80 bp, Homo sapiens
agcttcatggctcccggcgcttcagttcctattaatccatggcttttctgcattgtagctcctgctgcctcttccattcc

SEQ ID NO: 194002 - DNA, 80 bp, Homo sapiens
tcccggcgcttcagttcctattaatccatggcttttctgcattgtagctcctgctgcctcttccattcctgttgccatgt

SEQ ID NO: 194003 - DNA, 82 bp, Homo sapiens
ttcagttcctattaatccatggcttttctgcattgtagctcctgctgcctcttccattcctgttgccatgttgccacatggt

SEQ ID NO: 194004 - DNA, 83 bp, Homo sapiens
cctattaatccatggcttttctgcattgtagctcctgctgcctcttccattcctgttgccatgttgccacatggttctggcta

SEQ ID NO: 194005 - DNA, 83 bp, Homo sapiens
attgtagctcctgctgcctcttccattcctgttgccatgttgccacatggttctggctaccttgtggttcttgcagtctcatc

SEQ ID NO: 194006 - DNA, 84 bp, Homo sapiens
tgctgcctcttccattcctgttgccatgttgccacatggttctggctaccttgtggttcttgcagtctcatcgcttctactgtc

SEQ ID NO: 194007 - DNA, 85 bp, Homo sapiens
tccattcctgttgccatgttgccacatggttctggctaccttgtggttcttgcagtctcatcgcttctactgtctcatgatctta

SEQ ID NO: 194008 - DNA, 85 bp, Homo sapiens
gttgccatgttgccacatggttctggctaccttgtggttcttgcagtctcatcgcttctactgtctcatgatcttatctattcaa

SEQ ID NO: 194009 - DNA, 83 bp, Homo sapiens
atgttgccacatggttctggctaccttgtggttcttgcagtctcatcgcttctactgtctcatgatcttatctattcaagcct

SEQ ID NO: 194010 - DNA, 83 bp, Homo sapiens
atggttctggctaccttgtggttcttgcagtctcatcgcttctactgtctcatgatcttatctattcaagccttctgctgctt

SEQ ID NO: 194011 - DNA, 87 bp, Homo sapiens
ttgtggttcttgcagtctcatcgcttctactgtctcatgatcttatctattcaagccttctgctgctttgtggatctcatagtcagt

SEQ ID NO: 194012 - DNA, 87 bp, Homo sapiens
ttcttgcagtctcatcgcttctactgtctcatgatcttatctattcaagccttctgctgctttgtggatctcatagtcagttttgtc

SEQ ID NO: 194013 - DNA, 82 bp, Homo sapiens
atcgcttctactgtctcatgatcttatctattcaagccttctgctgctttgtggatctcatagtcagttttgtctcacggtt

SEQ ID NO: 194014 - DNA, 83 bp, Homo sapiens
tctactgtctcatgatcttatctattcaagccttctgctgctttgtggatctcatagtcagttttgtctcacggtttctgttc

SEQ ID NO: 194015 - DNA, 78 bp, Homo sapiens
tttgtggatctcatagtcagttttgtctcacggtttctgttcctcgtggctcctattgcttcatggcttctagcccat

SEQ ID NO: 194016 - DNA, 77 bp, Homo sapiens
atagtcagttttgtctcacggtttctgttcctcgtggctcctattgcttcatggcttctagcccattgttgccttgc

SEQ ID NO: 194017 - DNA, 86 bp, Homo sapiens
tcgtggctcctattgcttcatggcttctagcccattgttgccttgctgcttcatggcttctgccaccctgtggctccgtgatctca

SEQ ID NO: 194018 - DNA, 85 bp, Homo sapiens
tattgcttcatggcttctagcccattgttgccttgctgcttcatggcttctgccaccctgtggctccgtgatctcattatacaaa

SEQ ID NO: 194019 - DNA, 86 bp, Homo sapiens
ttcatggcttctagcccattgttgccttgctgcttcatggcttctgccaccctgtggctccgtgatctcattatacaaatgtctca

SEQ ID NO: 194020 - DNA, 85 bp, Homo sapiens
ccattgttgccttgctgcttcatggcttctgccaccctgtggctccgtgatctcattatacaaatgtctcatgacctctgcttac

SEQ ID NO: 194021 - DNA, 83 bp, Homo sapiens
cttgctgcttcatggcttctgccaccctgtggctccgtgatctcattatacaaatgtctcatgacctctgcttacttatggtt

SEQ ID NO: 194022 - DNA, 84 bp, Homo sapiens
ttcatggcttctgccaccctgtggctccgtgatctcattatacaaatgtctcatgacctctgcttacttatggtttctgcagct

SEQ ID NO: 194023 - DNA, 82 bp, Homo sapiens
tctgccaccctgtggctccgtgatctcattatacaaatgtctcatgacctctgcttacttatggtttctgcagctttctctt

SEQ ID NO: 194024 - DNA, 80 bp, Homo sapiens
cctgtggctccgtgatctcattatacaaatgtctcatgacctctgcttacttatggtttctgcagctttctctttgcttt

SEQ ID NO: 194025 - DNA, 78 bp, Homo sapiens
atctcattatacaaatgtctcatgacctctgcttacttatggtttctgcagctttctctttgcttttgctgtttagtt

SEQ ID NO: 194026 - DNA, 78 bp, Homo sapiens
ttatacaaatgtctcatgacctctgcttacttatggtttctgcagctttctctttgcttttgctgtttagtttctggc

SEQ ID NO: 194027 - DNA, 76 bp, Homo sapiens
atgacctctgcttacttatggtttctgcagctttctctttgcttttgctgtttagtttctggccacccctcatcca

SEQ ID NO: 194028 - DNA, 76 bp, Homo sapiens
tctgcttacttatggtttctgcagctttctctttgcttttgctgtttagtttctggccacccctcatccaccacca

SEQ ID NO: 194029 - DNA, 76 bp, Homo sapiens
gtttctgcagctttctctttgcttttgctgtttagtttctggccacccctcatccaccaccactaatgcctcatta

SEQ ID NO: 194030 - DNA, 73 bp, Homo sapiens
ctttctctttgcttttgctgtttagtttctggccacccctcatccaccaccactaatgcctcattaaattcta

SEQ ID NO: 194031 - DNA, 72 bp, Homo sapiens
tgcttttgctgtttagtttctggccacccctcatccaccaccactaatgcctcattaaattctaattaacgt

SEQ ID NO: 194032 - DNA, 74 bp, Homo sapiens
tttctggccacccctcatccaccaccactaatgcctcattaaattctaattaacgttcacttcttctgaatagc

SEQ ID NO: 194033 - DNA, 79 bp, Homo sapiens
tcatccaccaccactaatgcctcattaaattctaattaacgttcacttcttctgaatagctcacattctgcctccctga

SEQ ID NO: 194034 - DNA, 75 bp, Homo sapiens
aaattctaattaacgttcacttcttctgaatagctcacattctgcctccctgaaagatctggttgtttcatacat

SEQ ID NO: 194035 - DNA, 81 bp, Homo sapiens
ttctgaatagctcacattctgcctccctgaaagatctggttgtttcatacatttgccatttgatacatgccacccctgtaa

SEQ ID NO: 194036 - DNA, 80 bp, Homo sapiens
tagctcacattctgcctccctgaaagatctggttgtttcatacatttgccatttgatacatgccacccctgtaaggtgaa

SEQ ID NO: 194037 - DNA, 77 bp, Homo sapiens
ctccctgaaagatctggttgtttcatacatttgccatttgatacatgccacccctgtaaggtgaagtccttatgcca

SEQ ID NO: 194038 - DNA, 78 bp, Homo sapiens
agatctggttgtttcatacatttgccatttgatacatgccacccctgtaaggtgaagtccttatgccagtccagctaa

SEQ ID NO: 194039 - DNA, 79 bp, Homo sapiens
tttgccatttgatacatgccacccctgtaaggtgaagtccttatgccagtccagctaacaggccactggccagcctaga

SEQ ID NO: 194040 - DNA, 78 bp, Homo sapiens
atttgatacatgccacccctgtaaggtgaagtccttatgccagtccagctaacaggccactggccagcctagagattg

SEQ ID NO: 194041 - DNA, 75 bp, Homo sapiens
acccctgtaaggtgaagtccttatgccagtccagctaacaggccactggccagcctagagattggttgcccttga

SEQ ID NO: 194042 - DNA, 77 bp, Homo sapiens
gtaaggtgaagtccttatgccagtccagctaacaggccactggccagcctagagattggttgcccttgaaccagaca

SEQ ID NO: 194043 - DNA, 82 bp, Homo sapiens
ttatgccagtccagctaacaggccactggccagcctagagattggttgcccttgaaccagacactatccacatctagctatc

SEQ ID NO: 194044 - DNA, 81 bp, Homo sapiens
agtccagctaacaggccactggccagcctagagattggttgcccttgaaccagacactatccacatctagctatctgtggc

SEQ ID NO: 194045 - DNA, 80 bp, Homo sapiens
aacaggccactggccagcctagagattggttgcccttgaaccagacactatccacatctagctatctgtggccaggattg

SEQ ID NO: 194046 - DNA, 82 bp, Homo sapiens
agcctagagattggttgcccttgaaccagacactatccacatctagctatctgtggccaggattgtgaggtcacatggtaca

SEQ ID NO: 194047 - DNA, 84 bp, Homo sapiens
agagattggttgcccttgaaccagacactatccacatctagctatctgtggccaggattgtgaggtcacatggtacagagcatg

SEQ ID NO: 194048 - DNA, 86 bp, Homo sapiens
ttgaaccagacactatccacatctagctatctgtggccaggattgtgaggtcacatggtacagagcatggcaacttatgctaagga

SEQ ID NO: 194049 - DNA, 80 bp, Homo sapiens
acatctagctatctgtggccaggattgtgaggtcacatggtacagagcatggcaacttatgctaaggaaaccccttagaa

SEQ ID NO: 194050 - DNA, 79 bp, Homo sapiens
gattgtgaggtcacatggtacagagcatggcaacttatgctaaggaaaccccttagaagggactgcaagcatggcaggt

SEQ ID NO: 194051 - DNA, 78 bp, Homo sapiens
tcacatggtacagagcatggcaacttatgctaaggaaaccccttagaagggactgcaagcatggcaggtttgctaagg

SEQ ID NO: 194052 - DNA, 72 bp, Homo sapiens
atggcaacttatgctaaggaaaccccttagaagggactgcaagcatggcaggtttgctaagggtttccagaa

SEQ ID NO: 194053 - DNA, 70 bp, Homo sapiens
taaggaaaccccttagaagggactgcaagcatggcaggtttgctaagggtttccagaagggggcagtgta

SEQ ID NO: 194054 - DNA, 73 bp, Homo sapiens
ccttagaagggactgcaagcatggcaggtttgctaagggtttccagaagggggcagtgtaattggcaaccatc

SEQ ID NO: 194055 - DNA, 72 bp, Homo sapiens
aagggactgcaagcatggcaggtttgctaagggtttccagaagggggcagtgtaattggcaaccatcttgtt

SEQ ID NO: 194056 - DNA, 72 bp, Homo sapiens
atggcaggtttgctaagggtttccagaagggggcagtgtaattggcaaccatcttgtttgacctgtccaata

SEQ ID NO: 194057 - DNA, 70 bp, Homo sapiens
aggtttgctaagggtttccagaagggggcagtgtaattggcaaccatcttgtttgacctgtccaatacat

SEQ ID NO: 194058 - DNA, 70 bp, Homo sapiens
aaccatcttgtttgacctgtccaatacattgaccttcaaggttcaacctaagtcccaccttctccctgac

SEQ ID NO: 194059 - DNA, 73 bp, Homo sapiens
aatacattgaccttcaaggttcaacctaagtcccaccttctccctgaccacctctgcctgtcctgatctacaa

SEQ ID NO: 194060 - DNA, 76 bp, Homo sapiens
ttcaaggttcaacctaagtcccaccttctccctgaccacctctgcctgtcctgatctacaatgggatagatcaaga

SEQ ID NO: 194061 - DNA, 81 bp, Homo sapiens
cctgaccacctctgcctgtcctgatctacaatgggatagatcaagatcaagactccagagatgacatagaaaggaaaccta

SEQ ID NO: 194062 - DNA, 80 bp, Homo sapiens
tctgcctgtcctgatctacaatgggatagatcaagatcaagactccagagatgacatagaaaggaaacctaggttccatt

SEQ ID NO: 194063 - DNA, 79 bp, Homo sapiens
ctgtcctgatctacaatgggatagatcaagatcaagactccagagatgacatagaaaggaaacctaggttccatttctg

SEQ ID NO: 194064 - DNA, 76 bp, Homo sapiens
aatgggatagatcaagatcaagactccagagatgacatagaaaggaaacctaggttccatttctggctccaacact

SEQ ID NO: 194065 - DNA, 78 bp, Homo sapiens
atagatcaagatcaagactccagagatgacatagaaaggaaacctaggttccatttctggctccaacacttcctagca

SEQ ID NO: 194066 - DNA, 75 bp, Homo sapiens
atcaagactccagagatgacatagaaaggaaacctaggttccatttctggctccaacacttcctagcagtcggac

SEQ ID NO: 194067 - DNA, 70 bp, Homo sapiens
atgacatagaaaggaaacctaggttccatttctggctccaacacttcctagcagtcggaccttaggaagt

SEQ ID NO: 194068 - DNA, 68 bp, Homo sapiens
tagaaaggaaacctaggttccatttctggctccaacacttcctagcagtcggaccttaggaagttaat

SEQ ID NO: 194069 - DNA, 69 bp, Homo sapiens
aacctaggttccatttctggctccaacacttcctagcagtcggaccttaggaagttaattcccctctga

SEQ ID NO: 194070 - DNA, 70 bp, Homo sapiens
atttctggctccaacacttcctagcagtcggaccttaggaagttaattcccctctgaggacctcagaagg

SEQ ID NO: 194071 - DNA, 68 bp, Homo sapiens
tccaacacttcctagcagtcggaccttaggaagttaattcccctctgaggacctcagaaggggtttgg

SEQ ID NO: 194072 - DNA, 74 bp, Homo sapiens
tctgaggacctcagaaggggtttgggcagtcttcccttacaagtctgacattctgggtatctcactataagtta

SEQ ID NO: 194073 - DNA, 74 bp, Homo sapiens
tcagaaggggtttgggcagtcttcccttacaagtctgacattctgggtatctcactataagttattgtataaga

SEQ ID NO: 194074 - DNA, 77 bp, Homo sapiens
tttgggcagtcttcccttacaagtctgacattctgggtatctcactataagttattgtataagagatgtgactctta

SEQ ID NO: 194075 - DNA, 75 bp, Homo sapiens
ttcccttacaagtctgacattctgggtatctcactataagttattgtataagagatgtgactcttacctgggaaa

SEQ ID NO: 194076 - DNA, 75 bp, Homo sapiens
aagtctgacattctgggtatctcactataagttattgtataagagatgtgactcttacctgggaaagccctcaaa

SEQ ID NO: 194077 - DNA, 74 bp, Homo sapiens
acattctgggtatctcactataagttattgtataagagatgtgactcttacctgggaaagccctcaaaaacatc

SEQ ID NO: 194078 - DNA, 75 bp, Homo sapiens
gtatctcactataagttattgtataagagatgtgactcttacctgggaaagccctcaaaaacatctcttgaggta

SEQ ID NO: 194079 - DNA, 74 bp, Homo sapiens
tataagagatgtgactcttacctgggaaagccctcaaaaacatctcttgaggtaggaaagagggagtcagagtc

SEQ ID NO: 194080 - DNA, 71 bp, Homo sapiens
actcttacctgggaaagccctcaaaaacatctcttgaggtaggaaagagggagtcagagtcctggcttgga

SEQ ID NO: 194081 - DNA, 72 bp, Homo sapiens
tgggaaagccctcaaaaacatctcttgaggtaggaaagagggagtcagagtcctggcttggaagagccttac

SEQ ID NO: 194082 - DNA, 75 bp, Homo sapiens
ctcaaaaacatctcttgaggtaggaaagagggagtcagagtcctggcttggaagagccttactgcacactggagg

SEQ ID NO: 194083 - DNA, 77 bp, Homo sapiens
tcttgaggtaggaaagagggagtcagagtcctggcttggaagagccttactgcacactggaggtgcttagccaagat

SEQ ID NO: 194084 - DNA, 77 bp, Homo sapiens
taggaaagagggagtcagagtcctggcttggaagagccttactgcacactggaggtgcttagccaagatttattgaa

SEQ ID NO: 194085 - DNA, 81 bp, Homo sapiens
agtcagagtcctggcttggaagagccttactgcacactggaggtgcttagccaagatttattgaactggatgaatgaatca

SEQ ID NO: 194086 - DNA, 81 bp, Homo sapiens
ctggcttggaagagccttactgcacactggaggtgcttagccaagatttattgaactggatgaatgaatcaatggcttgtg

SEQ ID NO: 194087 - DNA, 78 bp, Homo sapiens
cttactgcacactggaggtgcttagccaagatttattgaactggatgaatgaatcaatggcttgtggaggggtgggga

SEQ ID NO: 194088 - DNA, 74 bp, Homo sapiens
actggaggtgcttagccaagatttattgaactggatgaatgaatcaatggcttgtggaggggtggggagtgggg

SEQ ID NO: 194089 - DNA, 76 bp, Homo sapiens
ttagccaagatttattgaactggatgaatgaatcaatggcttgtggaggggtggggagtgggggggcagtgagaga

SEQ ID NO: 194090 - DNA, 74 bp, Homo sapiens
ttgtggaggggtggggagtgggggggcagtgagagaccacacagcacacagaatgtctaactaacttgaggaat

SEQ ID NO: 194091 - DNA, 78 bp, Homo sapiens
ggagtgggggggcagtgagagaccacacagcacacagaatgtctaactaacttgaggaattccagttgctgaggagga

SEQ ID NO: 194092 - DNA, 82 bp, Homo sapiens
ggcagtgagagaccacacagcacacagaatgtctaactaacttgaggaattccagttgctgaggaggatgtaagcagattgt

SEQ ID NO: 194093 - DNA, 81 bp, Homo sapiens
agaccacacagcacacagaatgtctaactaacttgaggaattccagttgctgaggaggatgtaagcagattgtttcagaga

SEQ ID NO: 194094 - DNA, 81 bp, Homo sapiens
acagcacacagaatgtctaactaacttgaggaattccagttgctgaggaggatgtaagcagattgtttcagagatggataa

SEQ ID NO: 194095 - DNA, 77 bp, Homo sapiens
agaatgtctaactaacttgaggaattccagttgctgaggaggatgtaagcagattgtttcagagatggataaggaaa

SEQ ID NO: 194096 - DNA, 78 bp, Homo sapiens
actaacttgaggaattccagttgctgaggaggatgtaagcagattgtttcagagatggataaggaaagagatgactgg

SEQ ID NO: 194097 - DNA, 78 bp, Homo sapiens
aattccagttgctgaggaggatgtaagcagattgtttcagagatggataaggaaagagatgactgggacagggtagga

SEQ ID NO: 194098 - DNA, 82 bp, Homo sapiens
tgaggaggatgtaagcagattgtttcagagatggataaggaaagagatgactgggacagggtaggaatcatggctattcatg

SEQ ID NO: 194099 - DNA, 80 bp, Homo sapiens
taagcagattgtttcagagatggataaggaaagagatgactgggacagggtaggaatcatggctattcatgggtactcat

SEQ ID NO: 194100 - DNA, 79 bp, Homo sapiens
attgtttcagagatggataaggaaagagatgactgggacagggtaggaatcatggctattcatgggtactcattctatc

SEQ ID NO: 194101 - DNA, 81 bp, Homo sapiens
agagatggataaggaaagagatgactgggacagggtaggaatcatggctattcatgggtactcattctatcctctcagtca

SEQ ID NO: 194102 - DNA, 78 bp, Homo sapiens
aaggaaagagatgactgggacagggtaggaatcatggctattcatgggtactcattctatcctctcagtcaccctcca

SEQ ID NO: 194103 - DNA, 77 bp, Homo sapiens
tctatcctctcagtcaccctccacatccaataatcagtcattaagttatcatcttaccttaacagttcacaccttaa

SEQ ID NO: 194104 - DNA, 74 bp, Homo sapiens
cctccacatccaataatcagtcattaagttatcatcttaccttaacagttcacaccttaacacctccaatctat

SEQ ID NO: 194105 - DNA, 72 bp, Homo sapiens
ttaacagttcacaccttaacacctccaatctattcctactggcctttgccctagtgcaggcctcctggtctt

SEQ ID NO: 194106 - DNA, 72 bp, Homo sapiens
ttcacaccttaacacctccaatctattcctactggcctttgccctagtgcaggcctcctggtctttttccag

SEQ ID NO: 194107 - DNA, 74 bp, Homo sapiens
ctccaatctattcctactggcctttgccctagtgcaggcctcctggtctttttccagtctcctagctaatcttg

SEQ ID NO: 194108 - DNA, 76 bp, Homo sapiens
atctattcctactggcctttgccctagtgcaggcctcctggtctttttccagtctcctagctaatcttgtcatctc

SEQ ID NO: 194109 - DNA, 82 bp, Homo sapiens
tagtgcaggcctcctggtctttttccagtctcctagctaatcttgtcatctccattcgctctctcacaaatggattcactca

SEQ ID NO: 194110 - DNA, 81 bp, Homo sapiens
aggcctcctggtctttttccagtctcctagctaatcttgtcatctccattcgctctctcacaaatggattcactcatgcat

SEQ ID NO: 194111 - DNA, 74 bp, Homo sapiens
attcattcattcaaaaactttactgggtgcctgttttgtgtcaggcactgtgcttttttgcaggggctatactg

SEQ ID NO: 194112 - DNA, 73 bp, Homo sapiens
actttactgggtgcctgttttgtgtcaggcactgtgcttttttgcaggggctatactggtaagcaaaatatcc

SEQ ID NO: 194113 - DNA, 73 bp, Homo sapiens
tgttttgtgtcaggcactgtgcttttttgcaggggctatactggtaagcaaaatatccccaggcccacccttg

SEQ ID NO: 194114 - DNA, 73 bp, Homo sapiens
caggcactgtgcttttttgcaggggctatactggtaagcaaaatatccccaggcccacccttgtggtgcctaa

SEQ ID NO: 194115 - DNA, 71 bp, Homo sapiens
tgcttttttgcaggggctatactggtaagcaaaatatccccaggcccacccttgtggtgcctaaagcttat

SEQ ID NO: 194116 - DNA, 73 bp, Homo sapiens
tatactggtaagcaaaatatccccaggcccacccttgtggtgcctaaagcttattcagagacaaaataagcaa

SEQ ID NO: 194117 - DNA, 72 bp, Homo sapiens
aaatatccccaggcccacccttgtggtgcctaaagcttattcagagacaaaataagcaaatatagtagtgta

SEQ ID NO: 194118 - DNA, 74 bp, Homo sapiens
aggcccacccttgtggtgcctaaagcttattcagagacaaaataagcaaatatagtagtgtaagaagctgatta

SEQ ID NO: 194119 - DNA, 76 bp, Homo sapiens
ttgtggtgcctaaagcttattcagagacaaaataagcaaatatagtagtgtaagaagctgattaacagggaagcta

SEQ ID NO: 194120 - DNA, 75 bp, Homo sapiens
taaagcttattcagagacaaaataagcaaatatagtagtgtaagaagctgattaacagggaagctacaggcacgg

SEQ ID NO: 194121 - DNA, 78 bp, Homo sapiens
ttattcagagacaaaataagcaaatatagtagtgtaagaagctgattaacagggaagctacaggcacgggcacataca

SEQ ID NO: 194122 - DNA, 79 bp, Homo sapiens
agacaaaataagcaaatatagtagtgtaagaagctgattaacagggaagctacaggcacgggcacatacagcatgaaca

SEQ ID NO: 194123 - DNA, 79 bp, Homo sapiens
aataagcaaatatagtagtgtaagaagctgattaacagggaagctacaggcacgggcacatacagcatgaacatctaac

SEQ ID NO: 194124 - DNA, 79 bp, Homo sapiens
agcaaatatagtagtgtaagaagctgattaacagggaagctacaggcacgggcacatacagcatgaacatctaacctaa

SEQ ID NO: 194125 - DNA, 78 bp, Homo sapiens
aaatatagtagtgtaagaagctgattaacagggaagctacaggcacgggcacatacagcatgaacatctaacctaatc

SEQ ID NO: 194126 - DNA, 79 bp, Homo sapiens
attaacagggaagctacaggcacgggcacatacagcatgaacatctaacctaatctgttttccatgctggttggctagc

SEQ ID NO: 194127 - DNA, 81 bp, Homo sapiens
aagctacaggcacgggcacatacagcatgaacatctaacctaatctgttttccatgctggttggctagccagccagaaaca

SEQ ID NO: 194128 - DNA, 81 bp, Homo sapiens
gcacatacagcatgaacatctaacctaatctgttttccatgctggttggctagccagccagaaacaggttaagttcacatc

SEQ ID NO: 194129 - DNA, 81 bp, Homo sapiens
tacagcatgaacatctaacctaatctgttttccatgctggttggctagccagccagaaacaggttaagttcacatctgatc

SEQ ID NO: 194130 - DNA, 78 bp, Homo sapiens
acatctaacctaatctgttttccatgctggttggctagccagccagaaacaggttaagttcacatctgatctggagtc

SEQ ID NO: 194131 - DNA, 75 bp, Homo sapiens
tgttttccatgctggttggctagccagccagaaacaggttaagttcacatctgatctggagtccccctattaaaa

SEQ ID NO: 194132 - DNA, 73 bp, Homo sapiens
atgctggttggctagccagccagaaacaggttaagttcacatctgatctggagtccccctattaaaaaccatt

SEQ ID NO: 194133 - DNA, 75 bp, Homo sapiens
ttggctagccagccagaaacaggttaagttcacatctgatctggagtccccctattaaaaaccatttcatggctc

SEQ ID NO: 194134 - DNA, 75 bp, Homo sapiens
taagttcacatctgatctggagtccccctattaaaaaccatttcatggctccctcactgccttcaagctatggtt

SEQ ID NO: 194135 - DNA, 74 bp, Homo sapiens
acatctgatctggagtccccctattaaaaaccatttcatggctccctcactgccttcaagctatggtttccaaa

SEQ ID NO: 194136 - DNA, 72 bp, Homo sapiens
agtccccctattaaaaaccatttcatggctccctcactgccttcaagctatggtttccaaatctggctgtac

SEQ ID NO: 194137 - DNA, 75 bp, Homo sapiens
attaaaaaccatttcatggctccctcactgccttcaagctatggtttccaaatctggctgtaccctagtcatgtg

SEQ ID NO: 194138 - DNA, 76 bp, Homo sapiens
ttcatggctccctcactgccttcaagctatggtttccaaatctggctgtaccctagtcatgtggtaacctttataa

SEQ ID NO: 194139 - DNA, 76 bp, Homo sapiens
cctcactgccttcaagctatggtttccaaatctggctgtaccctagtcatgtggtaacctttataagcattcaaga

SEQ ID NO: 194140 - DNA, 74 bp, Homo sapiens
cttcaagctatggtttccaaatctggctgtaccctagtcatgtggtaacctttataagcattcaagattccaaa

SEQ ID NO: 194141 - DNA, 74 bp, Homo sapiens
ctatggtttccaaatctggctgtaccctagtcatgtggtaacctttataagcattcaagattccaaatcttcac

SEQ ID NO: 194142 - DNA, 72 bp, Homo sapiens
taccctagtcatgtggtaacctttataagcattcaagattccaaatcttcaccccagacttaatgaatgttt

SEQ ID NO: 194143 - DNA, 70 bp, Homo sapiens
atgtggtaacctttataagcattcaagattccaaatcttcaccccagacttaatgaatgttttaggggcc

SEQ ID NO: 194144 - DNA, 67 bp, Homo sapiens
attccaaatcttcaccccagacttaatgaatgttttaggggccggggcccagaatgccgtacctgtt

SEQ ID NO: 194145 - DNA, 69 bp, Homo sapiens
cccagacttaatgaatgttttaggggccggggcccagaatgccgtacctgtttgtggtatacagccagt

SEQ ID NO: 194146 - DNA, 69 bp, Homo sapiens
ttaatgaatgttttaggggccggggcccagaatgccgtacctgtttgtggtatacagccagtttgggaa

SEQ ID NO: 194147 - DNA, 69 bp, Homo sapiens
tgttttaggggccggggcccagaatgccgtacctgtttgtggtatacagccagtttgggaaccacactg

SEQ ID NO: 194148 - DNA, 71 bp, Homo sapiens
gggcccagaatgccgtacctgtttgtggtatacagccagtttgggaaccacactgtcctacaaaacaaatc

SEQ ID NO: 194149 - DNA, 72 bp, Homo sapiens
agaatgccgtacctgtttgtggtatacagccagtttgggaaccacactgtcctacaaaacaaatctgaattc

SEQ ID NO: 194150 - DNA, 76 bp, Homo sapiens
tttgtggtatacagccagtttgggaaccacactgtcctacaaaacaaatctgaattctgtagccatgcatttacga

SEQ ID NO: 194151 - DNA, 75 bp, Homo sapiens
tatacagccagtttgggaaccacactgtcctacaaaacaaatctgaattctgtagccatgcatttacgaccctct

SEQ ID NO: 194152 - DNA, 73 bp, Homo sapiens
agtttgggaaccacactgtcctacaaaacaaatctgaattctgtagccatgcatttacgaccctcttccaatc

SEQ ID NO: 194153 - DNA, 75 bp, Homo sapiens
acactgtcctacaaaacaaatctgaattctgtagccatgcatttacgaccctcttccaatctggttcctctctac

SEQ ID NO: 194154 - DNA, 73 bp, Homo sapiens
tacaaaacaaatctgaattctgtagccatgcatttacgaccctcttccaatctggttcctctctaccttttct

SEQ ID NO: 194155 - DNA, 75 bp, Homo sapiens
aaatctgaattctgtagccatgcatttacgaccctcttccaatctggttcctctctaccttttcttgctgctttc

SEQ ID NO: 194156 - DNA, 73 bp, Homo sapiens
tctgtagccatgcatttacgaccctcttccaatctggttcctctctaccttttcttgctgctttccccccacc

SEQ ID NO: 194157 - DNA, 67 bp, Homo sapiens
atttacgaccctcttccaatctggttcctctctaccttttcttgctgctttccccccaccccaggaa

SEQ ID NO: 194158 - DNA, 73 bp, Homo sapiens
tcttccaatctggttcctctctaccttttcttgctgctttccccccaccccaggaatcttcatgcttcagtat

SEQ ID NO: 194159 - DNA, 71 bp, Homo sapiens
aatctggttcctctctaccttttcttgctgctttccccccaccccaggaatcttcatgcttcagtatttgt

SEQ ID NO: 194160 - DNA, 72 bp, Homo sapiens
tctctaccttttcttgctgctttccccccaccccaggaatcttcatgcttcagtatttgttttgctgtttct

SEQ ID NO: 194161 - DNA, 75 bp, Homo sapiens
ttcttgctgctttccccccaccccaggaatcttcatgcttcagtatttgttttgctgtttcttgccttcatgtct

SEQ ID NO: 194162 - DNA, 80 bp, Homo sapiens
aggaatcttcatgcttcagtatttgttttgctgtttcttgccttcatgtcttcatgcatactgtttccaatatctggaaa

SEQ ID NO: 194163 - DNA, 76 bp, Homo sapiens
agtatttgttttgctgtttcttgccttcatgtcttcatgcatactgtttccaatatctggaaattccttctacttc

SEQ ID NO: 194164 - DNA, 77 bp, Homo sapiens
ctgtttcttgccttcatgtcttcatgcatactgtttccaatatctggaaattccttctacttcctcaactggctaat

SEQ ID NO: 194165 - DNA, 74 bp, Homo sapiens
ttcatgcatactgtttccaatatctggaaattccttctacttcctcaactggctaattcctacccgtccctcaa

SEQ ID NO: 194166 - DNA, 70 bp, Homo sapiens
atactgtttccaatatctggaaattccttctacttcctcaactggctaattcctacccgtccctcaagac

SEQ ID NO: 194167 - DNA, 71 bp, Homo sapiens
aatatctggaaattccttctacttcctcaactggctaattcctacccgtccctcaagactcagttcaggta

SEQ ID NO: 194168 - DNA, 71 bp, Homo sapiens
aattccttctacttcctcaactggctaattcctacccgtccctcaagactcagttcaggtatcaccaccta

SEQ ID NO: 194169 - DNA, 80 bp, Homo sapiens
tcaagactcagttcaggtatcaccacctagactacaggatgccttctctgaatcttcacataagctagatgtttttcctg

SEQ ID NO: 194170 - DNA, 80 bp, Homo sapiens
actcagttcaggtatcaccacctagactacaggatgccttctctgaatcttcacataagctagatgtttttcctgtgctc

SEQ ID NO: 194171 - DNA, 84 bp, Homo sapiens
tatcaccacctagactacaggatgccttctctgaatcttcacataagctagatgtttttcctgtgctcctgtcagtgttgatca

SEQ ID NO: 194172 - DNA, 82 bp, Homo sapiens
actacaggatgccttctctgaatcttcacataagctagatgtttttcctgtgctcctgtcagtgttgatcacactgtatggt

SEQ ID NO: 194173 - DNA, 82 bp, Homo sapiens
aggatgccttctctgaatcttcacataagctagatgtttttcctgtgctcctgtcagtgttgatcacactgtatggttaatg

SEQ ID NO: 194174 - DNA, 79 bp, Homo sapiens
aatcttcacataagctagatgtttttcctgtgctcctgtcagtgttgatcacactgtatggttaatggctgttttacaa

SEQ ID NO: 194175 - DNA, 76 bp, Homo sapiens
ataagctagatgtttttcctgtgctcctgtcagtgttgatcacactgtatggttaatggctgttttacaaatggtt

SEQ ID NO: 194176 - DNA, 74 bp, Homo sapiens
atgtttttcctgtgctcctgtcagtgttgatcacactgtatggttaatggctgttttacaaatggtttccccaa

SEQ ID NO: 194177 - DNA, 76 bp, Homo sapiens
ctgtgctcctgtcagtgttgatcacactgtatggttaatggctgttttacaaatggtttccccaactaaacagtga

SEQ ID NO: 194178 - DNA, 73 bp, Homo sapiens
agtgttgatcacactgtatggttaatggctgttttacaaatggtttccccaactaaacagtgagctcctcaaa

SEQ ID NO: 194179 - DNA, 72 bp, Homo sapiens
acactgtatggttaatggctgttttacaaatggtttccccaactaaacagtgagctcctcaaaggcaggata

SEQ ID NO: 194180 - DNA, 72 bp, Homo sapiens
tgttttacaaatggtttccccaactaaacagtgagctcctcaaaggcaggataaagatttgactcatctttg

SEQ ID NO: 194181 - DNA, 72 bp, Homo sapiens
acaaatggtttccccaactaaacagtgagctcctcaaaggcaggataaagatttgactcatctttgtgttcc

SEQ ID NO: 194182 - DNA, 77 bp, Homo sapiens
aactaaacagtgagctcctcaaaggcaggataaagatttgactcatctttgtgttcctggtgcacaacactgtgatt

SEQ ID NO: 194183 - DNA, 79 bp, Homo sapiens
aacagtgagctcctcaaaggcaggataaagatttgactcatctttgtgttcctggtgcacaacactgtgatttccagag

SEQ ID NO: 194184 - DNA, 76 bp, Homo sapiens
aaaggcaggataaagatttgactcatctttgtgttcctggtgcacaacactgtgatttccagagggaagtgcccag

SEQ ID NO: 194185 - DNA, 75 bp, Homo sapiens
atttgactcatctttgtgttcctggtgcacaacactgtgatttccagagggaagtgcccagttaaacttaagata

SEQ ID NO: 194186 - DNA, 75 bp, Homo sapiens
ttgtgttcctggtgcacaacactgtgatttccagagggaagtgcccagttaaacttaagatactgttgtggagta

SEQ ID NO: 194187 - DNA, 75 bp, Homo sapiens
tgcacaacactgtgatttccagagggaagtgcccagttaaacttaagatactgttgtggagtactcttcaactcc

SEQ ID NO: 194188 - DNA, 72 bp, Homo sapiens
actgtgatttccagagggaagtgcccagttaaacttaagatactgttgtggagtactcttcaactccctaca

SEQ ID NO: 194189 - DNA, 73 bp, Homo sapiens
ttccagagggaagtgcccagttaaacttaagatactgttgtggagtactcttcaactccctacagcaaggcta

SEQ ID NO: 194190 - DNA, 75 bp, Homo sapiens
gcccagttaaacttaagatactgttgtggagtactcttcaactccctacagcaaggctactgcgtccacagtata

SEQ ID NO: 194191 - DNA, 74 bp, Homo sapiens
ttaaacttaagatactgttgtggagtactcttcaactccctacagcaaggctactgcgtccacagtataaggga

SEQ ID NO: 194192 - DNA, 74 bp, Homo sapiens
atactgttgtggagtactcttcaactccctacagcaaggctactgcgtccacagtataagggagtcaaactagt

SEQ ID NO: 194193 - DNA, 73 bp, Homo sapiens
agtactcttcaactccctacagcaaggctactgcgtccacagtataagggagtcaaactagttcctccaacaa

SEQ ID NO: 194194 - DNA, 74 bp, Homo sapiens
tacagcaaggctactgcgtccacagtataagggagtcaaactagttcctccaacaagccctagggaatctactc

SEQ ID NO: 194195 - DNA, 73 bp, Homo sapiens
tactgcgtccacagtataagggagtcaaactagttcctccaacaagccctagggaatctactcggatccagct

SEQ ID NO: 194196 - DNA, 72 bp, Homo sapiens
agtataagggagtcaaactagttcctccaacaagccctagggaatctactcggatccagcttgctcttggaa

SEQ ID NO: 194197 - DNA, 72 bp, Homo sapiens
agggagtcaaactagttcctccaacaagccctagggaatctactcggatccagcttgctcttggaaacactg

SEQ ID NO: 194198 - DNA, 74 bp, Homo sapiens
actagttcctccaacaagccctagggaatctactcggatccagcttgctcttggaaacactgtggtgcccagcc

SEQ ID NO: 194199 - DNA, 77 bp, Homo sapiens
aacaagccctagggaatctactcggatccagcttgctcttggaaacactgtggtgcccagcctcccgtgagcatagc

SEQ ID NO: 194200 - DNA, 78 bp, Homo sapiens
tactcggatccagcttgctcttggaaacactgtggtgcccagcctcccgtgagcatagccttgacaacggttgccctg

SEQ ID NO: 194201 - DNA, 77 bp, Homo sapiens
ttggaaacactgtggtgcccagcctcccgtgagcatagccttgacaacggttgccctgtgatgccaggaggtggtgg

SEQ ID NO: 194202 - DNA, 81 bp, Homo sapiens
tgcccagcctcccgtgagcatagccttgacaacggttgccctgtgatgccaggaggtggtggggcacgacaggagagagca

SEQ ID NO: 194203 - DNA, 78 bp, Homo sapiens
agcctcccgtgagcatagccttgacaacggttgccctgtgatgccaggaggtggtggggcacgacaggagagagcagg

SEQ ID NO: 194204 - DNA, 77 bp, Homo sapiens
atagccttgacaacggttgccctgtgatgccaggaggtggtggggcacgacaggagagagcagggggcaagcactaa

SEQ ID NO: 194205 - DNA, 78 bp, Homo sapiens
ttgacaacggttgccctgtgatgccaggaggtggtggggcacgacaggagagagcagggggcaagcactaaatagatc

SEQ ID NO: 194206 - DNA, 78 bp, Homo sapiens
ctgtgatgccaggaggtggtggggcacgacaggagagagcagggggcaagcactaaatagatccgagtggaagtctag

SEQ ID NO: 194207 - DNA, 77 bp, Homo sapiens
aggaggtggtggggcacgacaggagagagcagggggcaagcactaaatagatccgagtggaagtctaggctctgcca

SEQ ID NO: 194208 - DNA, 77 bp, Homo sapiens
gtggtggggcacgacaggagagagcagggggcaagcactaaatagatccgagtggaagtctaggctctgccactaaa

SEQ ID NO: 194209 - DNA, 76 bp, Homo sapiens
aggagagagcagggggcaagcactaaatagatccgagtggaagtctaggctctgccactaaaccagtggaatcttg

SEQ ID NO: 194210 - DNA, 76 bp, Homo sapiens
agagcagggggcaagcactaaatagatccgagtggaagtctaggctctgccactaaaccagtggaatcttggacaa

SEQ ID NO: 194211 - DNA, 75 bp, Homo sapiens
aagcactaaatagatccgagtggaagtctaggctctgccactaaaccagtggaatcttggacaagtcacctcacc

SEQ ID NO: 194212 - DNA, 76 bp, Homo sapiens
aatagatccgagtggaagtctaggctctgccactaaaccagtggaatcttggacaagtcacctcacctcctggatc

SEQ ID NO: 194213 - DNA, 74 bp, Homo sapiens
aagtctaggctctgccactaaaccagtggaatcttggacaagtcacctcacctcctggatcctcaggacttaag

SEQ ID NO: 194214 - DNA, 71 bp, Homo sapiens
taaaccagtggaatcttggacaagtcacctcacctcctggatcctcaggacttaagtccccaaagctcctt

SEQ ID NO: 194215 - DNA, 74 bp, Homo sapiens
aatcttggacaagtcacctcacctcctggatcctcaggacttaagtccccaaagctcctttgtagcacatgtgt

SEQ ID NO: 194216 - DNA, 76 bp, Homo sapiens
aagtcacctcacctcctggatcctcaggacttaagtccccaaagctcctttgtagcacatgtgttcctgtgtgcca

SEQ ID NO: 194217 - DNA, 74 bp, Homo sapiens
acctcctggatcctcaggacttaagtccccaaagctcctttgtagcacatgtgttcctgtgtgccagggcctta

SEQ ID NO: 194218 - DNA, 76 bp, Homo sapiens
acttaagtccccaaagctcctttgtagcacatgtgttcctgtgtgccagggccttagcctaaggcatctcatgtaa

SEQ ID NO: 194219 - DNA, 76 bp, Homo sapiens
aaagctcctttgtagcacatgtgttcctgtgtgccagggccttagcctaaggcatctcatgtaatcctttttatcc

SEQ ID NO: 194220 - DNA, 78 bp, Homo sapiens
ctttgtagcacatgtgttcctgtgtgccagggccttagcctaaggcatctcatgtaatcctttttatcctgtgaggta

SEQ ID NO: 194221 - DNA, 73 bp, Homo sapiens
tgttcctgtgtgccagggccttagcctaaggcatctcatgtaatcctttttatcctgtgaggtaggggttagt

SEQ ID NO: 194222 - DNA, 72 bp, Homo sapiens
cttagcctaaggcatctcatgtaatcctttttatcctgtgaggtaggggttagttatctgggttattatcca

SEQ ID NO: 194223 - DNA, 76 bp, Homo sapiens
taaggcatctcatgtaatcctttttatcctgtgaggtaggggttagttatctgggttattatccatgctggctgaa

SEQ ID NO: 194224 - DNA, 74 bp, Homo sapiens
atgtaatcctttttatcctgtgaggtaggggttagttatctgggttattatccatgctggctgaatcagatttc

SEQ ID NO: 194225 - DNA, 74 bp, Homo sapiens
tttttatcctgtgaggtaggggttagttatctgggttattatccatgctggctgaatcagatttccagaggtgg

SEQ ID NO: 194226 - DNA, 75 bp, Homo sapiens
gttagttatctgggttattatccatgctggctgaatcagatttccagaggtgggaccagagcaatttatttttaa

SEQ ID NO: 194227 - DNA, 79 bp, Homo sapiens
tatccatgctggctgaatcagatttccagaggtgggaccagagcaatttatttttaaagagctccacatcctttggatg

SEQ ID NO: 194228 - DNA, 74 bp, Homo sapiens
ggctgaatcagatttccagaggtgggaccagagcaatttatttttaaagagctccacatcctttggatgtgggg

SEQ ID NO: 194229 - DNA, 77 bp, Homo sapiens
gaccagagcaatttatttttaaagagctccacatcctttggatgtgggggtgcaagcagggaactgctgcttctcat

SEQ ID NO: 194230 - DNA, 77 bp, Homo sapiens
ttttaaagagctccacatcctttggatgtgggggtgcaagcagggaactgctgcttctcattataagcccttctgta

SEQ ID NO: 194231 - DNA, 74 bp, Homo sapiens
acatcctttggatgtgggggtgcaagcagggaactgctgcttctcattataagcccttctgtactattttattt

SEQ ID NO: 194232 - DNA, 72 bp, Homo sapiens
ggaaaaagaaaaagctttacaaacgattctgatgcgcagccaaggttgataaccacctgtacagtggagaaa

SEQ ID NO: 194233 - DNA, 76 bp, Homo sapiens
aaaaagctttacaaacgattctgatgcgcagccaaggttgataaccacctgtacagtggagaaagcacttgaatga

SEQ ID NO: 194234 - DNA, 78 bp, Homo sapiens
tttacaaacgattctgatgcgcagccaaggttgataaccacctgtacagtggagaaagcacttgaatgacttggaaga

SEQ ID NO: 194235 - DNA, 78 bp, Homo sapiens
attctgatgcgcagccaaggttgataaccacctgtacagtggagaaagcacttgaatgacttggaagacctgggttca

SEQ ID NO: 194236 - DNA, 70 bp, Homo sapiens
caaggttgataaccacctgtacagtggagaaagcacttgaatgacttggaagacctgggttcaaaccttt

SEQ ID NO: 194237 - DNA, 71 bp, Homo sapiens
ttgataaccacctgtacagtggagaaagcacttgaatgacttggaagacctgggttcaaacctttttgggc

SEQ ID NO: 194238 - DNA, 70 bp, Homo sapiens
cctgtacagtggagaaagcacttgaatgacttggaagacctgggttcaaacctttttgggcctcagtttc

SEQ ID NO: 194239 - DNA, 76 bp, Homo sapiens
cttatctgtaaagtggggagaacagcaaaggtgacctttaaagggctgtgaatgatctagatgccagccaaattgc

SEQ ID NO: 194240 - DNA, 78 bp, Homo sapiens
taaagtggggagaacagcaaaggtgacctttaaagggctgtgaatgatctagatgccagccaaattgcttcatatata

SEQ ID NO: 194241 - DNA, 77 bp, Homo sapiens
ggagaacagcaaaggtgacctttaaagggctgtgaatgatctagatgccagccaaattgcttcatatatatttaatt

SEQ ID NO: 194242 - DNA, 75 bp, Homo sapiens
caaaggtgacctttaaagggctgtgaatgatctagatgccagccaaattgcttcatatatatttaattttctctt

SEQ ID NO: 194243 - DNA, 80 bp, Homo sapiens
tttaaagggctgtgaatgatctagatgccagccaaattgcttcatatatatttaattttctctttgcttcactactgcaa

SEQ ID NO: 194244 - DNA, 80 bp, Homo sapiens
ctgtgaatgatctagatgccagccaaattgcttcatatatatttaattttctctttgcttcactactgcaaggtaggtgt

SEQ ID NO: 194245 - DNA, 80 bp, Homo sapiens
tgaatgatctagatgccagccaaattgcttcatatatatttaattttctctttgcttcactactgcaaggtaggtgttta

SEQ ID NO: 194246 - DNA, 78 bp, Homo sapiens
aatgatctagatgccagccaaattgcttcatatatatttaattttctctttgcttcactactgcaaggtaggtgttta

SEQ ID NO: 194247 - DNA, 78 bp, Homo sapiens
tctagatgccagccaaattgcttcatatatatttaattttctctttgcttcactactgcaaggtaggtgtttattatc

SEQ ID NO: 194248 - DNA, 76 bp, Homo sapiens
atgccagccaaattgcttcatatatatttaattttctctttgcttcactactgcaaggtaggtgtttattatctcc

SEQ ID NO: 194249 - DNA, 73 bp, Homo sapiens
agccaaattgcttcatatatatttaattttctctttgcttcactactgcaaggtaggtgtttattatctcctt

SEQ ID NO: 194250 - DNA, 71 bp, Homo sapiens
atatttaattttctctttgcttcactactgcaaggtaggtgtttattatctccttttacagatgtggaaac

SEQ ID NO: 194251 - DNA, 72 bp, Homo sapiens
taattttctctttgcttcactactgcaaggtaggtgtttattatctccttttacagatgtggaaacttaggc

SEQ ID NO: 194252 - DNA, 73 bp, Homo sapiens
attttctctttgcttcactactgcaaggtaggtgtttattatctccttttacagatgtggaaacttaggctca

SEQ ID NO: 194253 - DNA, 71 bp, Homo sapiens
aggtaggtgtttattatctccttttacagatgtggaaacttaggctcagaggtgaagtaacttgcacaagt

SEQ ID NO: 194254 - DNA, 75 bp, Homo sapiens
ttattatctccttttacagatgtggaaacttaggctcagaggtgaagtaacttgcacaagtttctacagctagaa

SEQ ID NO: 194255 - DNA, 75 bp, Homo sapiens
agatgtggaaacttaggctcagaggtgaagtaacttgcacaagtttctacagctagaatttgaaccaggtctgac

SEQ ID NO: 194256 - DNA, 73 bp, Homo sapiens
ttaggctcagaggtgaagtaacttgcacaagtttctacagctagaatttgaaccaggtctgacccccgaattg

SEQ ID NO: 194257 - DNA, 74 bp, Homo sapiens
ggtgaagtaacttgcacaagtttctacagctagaatttgaaccaggtctgacccccgaattgtgctcgtccata

SEQ ID NO: 194258 - DNA, 72 bp, Homo sapiens
agtaacttgcacaagtttctacagctagaatttgaaccaggtctgacccccgaattgtgctcgtccataaag

SEQ ID NO: 194259 - DNA, 74 bp, Homo sapiens
tttctacagctagaatttgaaccaggtctgacccccgaattgtgctcgtccataaaggccagcatttgccaaat

SEQ ID NO: 194260 - DNA, 76 bp, Homo sapiens
tttgaaccaggtctgacccccgaattgtgctcgtccataaaggccagcatttgccaaattatggcacacagtacca

SEQ ID NO: 194261 - DNA, 75 bp, Homo sapiens
acccccgaattgtgctcgtccataaaggccagcatttgccaaattatggcacacagtaccaccagtggtacgtga

SEQ ID NO: 194262 - DNA, 76 bp, Homo sapiens
aattgtgctcgtccataaaggccagcatttgccaaattatggcacacagtaccaccagtggtacgtgacttctttg

SEQ ID NO: 194263 - DNA, 75 bp, Homo sapiens
tccataaaggccagcatttgccaaattatggcacacagtaccaccagtggtacgtgacttctttggttgaaaaca

SEQ ID NO: 194264 - DNA, 73 bp, Homo sapiens
agcatttgccaaattatggcacacagtaccaccagtggtacgtgacttctttggttgaaaacagacaaattta

SEQ ID NO: 194265 - DNA, 69 bp, Homo sapiens
aaattatggcacacagtaccaccagtggtacgtgacttctttggttgaaaacagacaaatttattttgt

SEQ ID NO: 194266 - DNA, 69 bp, Homo sapiens
cacacagtaccaccagtggtacgtgacttctttggttgaaaacagacaaatttattttgttttgatagt

SEQ ID NO: 194267 - DNA, 69 bp, Homo sapiens
gtaccaccagtggtacgtgacttctttggttgaaaacagacaaatttattttgttttgatagttatgtc

SEQ ID NO: 194268 - DNA, 69 bp, Homo sapiens
tggtacgtgacttctttggttgaaaacagacaaatttattttgttttgatagttatgtcttttaatatg

SEQ ID NO: 194269 - DNA, 69 bp, Homo sapiens
cttctttggttgaaaacagacaaatttattttgttttgatagttatgtcttttaatatgtattagaaga

SEQ ID NO: 194270 - DNA, 75 bp, Homo sapiens
acagacaaatttattttgttttgatagttatgtcttttaatatgtattagaagaatacataattagcacacatca

SEQ ID NO: 194271 - DNA, 75 bp, Homo sapiens
ttattttgttttgatagttatgtcttttaatatgtattagaagaatacataattagcacacatcaaacctgtgat

SEQ ID NO: 194272 - DNA, 82 bp, Homo sapiens
tatgtattagaagaatacataattagcacacatcaaacctgtgatttcacagatatcactacttgggatgaaaatgatatag

SEQ ID NO: 194273 - DNA, 81 bp, Homo sapiens
gaagaatacataattagcacacatcaaacctgtgatttcacagatatcactacttgggatgaaaatgatataggataacaa

SEQ ID NO: 194274 - DNA, 80 bp, Homo sapiens
taattagcacacatcaaacctgtgatttcacagatatcactacttgggatgaaaatgatataggataacaatgttagacc

SEQ ID NO: 194275 - DNA, 80 bp, Homo sapiens
acatcaaacctgtgatttcacagatatcactacttgggatgaaaatgatataggataacaatgttagacctcagatcaac

SEQ ID NO: 194276 - DNA, 75 bp, Homo sapiens
cactacttgggatgaaaatgatataggataacaatgttagacctcagatcaacctcaagaaaaatactgagtaaa

SEQ ID NO: 194277 - DNA, 74 bp, Homo sapiens
gaaaatgatataggataacaatgttagacctcagatcaacctcaagaaaaatactgagtaaatagtacaggagg

SEQ ID NO: 194278 - DNA, 74 bp, Homo sapiens
tataggataacaatgttagacctcagatcaacctcaagaaaaatactgagtaaatagtacaggagggcaatttg

SEQ ID NO: 194279 - DNA, 72 bp, Homo sapiens
aacaatgttagacctcagatcaacctcaagaaaaatactgagtaaatagtacaggagggcaatttggaagta

SEQ ID NO: 194280 - DNA, 71 bp, Homo sapiens
gacctcagatcaacctcaagaaaaatactgagtaaatagtacaggagggcaatttggaagtattattaaaa

SEQ ID NO: 194281 - DNA, 68 bp, Homo sapiens
caacctcaagaaaaatactgagtaaatagtacaggagggcaatttggaagtattattaaaaaccaata

SEQ ID NO: 194282 - DNA, 71 bp, Homo sapiens
atactgagtaaatagtacaggagggcaatttggaagtattattaaaaaccaatatataaatatcctatgac

SEQ ID NO: 194283 - DNA, 72 bp, Homo sapiens
atagtacaggagggcaatttggaagtattattaaaaaccaatatataaatatcctatgactttgcaattcca

SEQ ID NO: 194284 - DNA, 71 bp, Homo sapiens
acaggagggcaatttggaagtattattaaaaaccaatatataaatatcctatgactttgcaattccacttc

SEQ ID NO: 194285 - DNA, 71 bp, Homo sapiens
ggaagtattattaaaaaccaatatataaatatcctatgactttgcaattccacttctaggaatcaacccta

SEQ ID NO: 194286 - DNA, 69 bp, Homo sapiens
ttaaaaaccaatatataaatatcctatgactttgcaattccacttctaggaatcaaccctaggtaaact

SEQ ID NO: 194287 - DNA, 74 bp, Homo sapiens
atatcctatgactttgcaattccacttctaggaatcaaccctaggtaaactttcatacatatactttcacacag

SEQ ID NO: 194288 - DNA, 76 bp, Homo sapiens
atgactttgcaattccacttctaggaatcaaccctaggtaaactttcatacatatactttcacacaggcatagtga

SEQ ID NO: 194289 - DNA, 76 bp, Homo sapiens
accctaggtaaactttcatacatatactttcacacaggcatagtgatgctcctgtgtagtattttgtaatagcaaa

SEQ ID NO: 194290 - DNA, 76 bp, Homo sapiens
ctttcatacatatactttcacacaggcatagtgatgctcctgtgtagtattttgtaatagcaaaacctaaaaacag

SEQ ID NO: 194291 - DNA, 76 bp, Homo sapiens
tatactttcacacaggcatagtgatgctcctgtgtagtattttgtaatagcaaaacctaaaaacagtcttaatgtc

SEQ ID NO: 194292 - DNA, 75 bp, Homo sapiens
aggcatagtgatgctcctgtgtagtattttgtaatagcaaaacctaaaaacagtcttaatgtccatcacaaaaga

SEQ ID NO: 194293 - DNA, 74 bp, Homo sapiens
gtgatgctcctgtgtagtattttgtaatagcaaaacctaaaaacagtcttaatgtccatcacaaaagaaatgcg

SEQ ID NO: 194294 - DNA, 70 bp, Homo sapiens
cctgtgtagtattttgtaatagcaaaacctaaaaacagtcttaatgtccatcacaaaagaaatgcgtaag

SEQ ID NO: 194295 - DNA, 71 bp, Homo sapiens
gtaatagcaaaacctaaaaacagtcttaatgtccatcacaaaagaaatgcgtaagtaaaatgtggtaatca

SEQ ID NO: 194296 - DNA, 81 bp, Homo sapiens
cagtcttaatgtccatcacaaaagaaatgcgtaagtaaaatgtggtaatcatatgatgacaatctatacagcaattacaga

SEQ ID NO: 194297 - DNA, 83 bp, Homo sapiens
tcacaaaagaaatgcgtaagtaaaatgtggtaatcatatgatgacaatctatacagcaattacagaagatggattgagctaca

SEQ ID NO: 194298 - DNA, 83 bp, Homo sapiens
cgtaagtaaaatgtggtaatcatatgatgacaatctatacagcaattacagaagatggattgagctacattaagtaacatgca

SEQ ID NO: 194299 - DNA, 87 bp, Homo sapiens
taaaatgtggtaatcatatgatgacaatctatacagcaattacagaagatggattgagctacattaagtaacatgcacagatctcaa

SEQ ID NO: 194300 - DNA, 84 bp, Homo sapiens
atatgatgacaatctatacagcaattacagaagatggattgagctacattaagtaacatgcacagatctcaaaaacatcgttaa

SEQ ID NO: 194301 - DNA, 81 bp, Homo sapiens
aatctatacagcaattacagaagatggattgagctacattaagtaacatgcacagatctcaaaaacatcgttaagcaaaga

SEQ ID NO: 194302 - DNA, 79 bp, Homo sapiens
atacagcaattacagaagatggattgagctacattaagtaacatgcacagatctcaaaaacatcgttaagcaaagaaaa

SEQ ID NO: 194303 - DNA, 75 bp, Homo sapiens
ggattgagctacattaagtaacatgcacagatctcaaaaacatcgttaagcaaagaaaacaaattgctaaacaat

SEQ ID NO: 194304 - DNA, 78 bp, Homo sapiens
taagtaacatgcacagatctcaaaaacatcgttaagcaaagaaaacaaattgctaaacaattcaatatatcatttgca

SEQ ID NO: 194305 - DNA, 76 bp, Homo sapiens
catcgttaagcaaagaaaacaaattgctaaacaattcaatatatcatttgcattaaacacacaatatttccaatga

SEQ ID NO: 194306 - DNA, 77 bp, Homo sapiens
gaaaacaaattgctaaacaattcaatatatcatttgcattaaacacacaatatttccaatgagttcacatatgtacg

SEQ ID NO: 194307 - DNA, 80 bp, Homo sapiens
tgctaaacaattcaatatatcatttgcattaaacacacaatatttccaatgagttcacatatgtacgtacaagcattaaa

SEQ ID NO: 194308 - DNA, 78 bp, Homo sapiens
ttcaatatatcatttgcattaaacacacaatatttccaatgagttcacatatgtacgtacaagcattaaaacaaagtc

SEQ ID NO: 194309 - DNA, 74 bp, Homo sapiens
catttgcattaaacacacaatatttccaatgagttcacatatgtacgtacaagcattaaaacaaagtctaaacg

SEQ ID NO: 194310 - DNA, 72 bp, Homo sapiens
aacacacaatatttccaatgagttcacatatgtacgtacaagcattaaaacaaagtctaaacggaagtacaa

SEQ ID NO: 194311 - DNA, 71 bp, Homo sapiens
atttccaatgagttcacatatgtacgtacaagcattaaaacaaagtctaaacggaagtacaacaaacaaca

SEQ ID NO: 194312 - DNA, 71 bp, Homo sapiens
agttcacatatgtacgtacaagcattaaaacaaagtctaaacggaagtacaacaaacaacagccactaaga

SEQ ID NO: 194313 - DNA, 69 bp, Homo sapiens
atatgtacgtacaagcattaaaacaaagtctaaacggaagtacaacaaacaacagccactaagaaggga

SEQ ID NO: 194314 - DNA, 69 bp, Homo sapiens
gtacaagcattaaaacaaagtctaaacggaagtacaacaaacaacagccactaagaagggaaggatcaa

SEQ ID NO: 194315 - DNA, 66 bp, Homo sapiens
aaaacaaagtctaaacggaagtacaacaaacaacagccactaagaagggaaggatcaaggagtggt

SEQ ID NO: 194316 - DNA, 73 bp, Homo sapiens
aacaaacaacagccactaagaagggaaggatcaaggagtggttggtagctgaatgagactatctttaacaatc

SEQ ID NO: 194317 - DNA, 73 bp, Homo sapiens
acaacagccactaagaagggaaggatcaaggagtggttggtagctgaatgagactatctttaacaatctaact

SEQ ID NO: 194318 - DNA, 73 bp, Homo sapiens
taagaagggaaggatcaaggagtggttggtagctgaatgagactatctttaacaatctaacttctcaaaagga

SEQ ID NO: 194319 - DNA, 78 bp, Homo sapiens
atcaaggagtggttggtagctgaatgagactatctttaacaatctaacttctcaaaaggagaatgaattcatgcatat

SEQ ID NO: 194320 - DNA, 76 bp, Homo sapiens
ggttggtagctgaatgagactatctttaacaatctaacttctcaaaaggagaatgaattcatgcatatttgggtaa

SEQ ID NO: 194321 - DNA, 74 bp, Homo sapiens
agactatctttaacaatctaacttctcaaaaggagaatgaattcatgcatatttgggtaattagaatggactta

SEQ ID NO: 194322 - DNA, 72 bp, Homo sapiens
taacaatctaacttctcaaaaggagaatgaattcatgcatatttgggtaattagaatggacttaacttttaa

SEQ ID NO: 194323 - DNA, 73 bp, Homo sapiens
ctcaaaaggagaatgaattcatgcatatttgggtaattagaatggacttaacttttaaaaagcaatatacaga

SEQ ID NO: 194324 - DNA, 73 bp, Homo sapiens
catgcatatttgggtaattagaatggacttaacttttaaaaagcaatatacagattggaattaaagtgtgatg

SEQ ID NO: 194325 - DNA, 72 bp, Homo sapiens
gggtaattagaatggacttaacttttaaaaagcaatatacagattggaattaaagtgtgatggtgtatgtga

SEQ ID NO: 194326 - DNA, 73 bp, Homo sapiens
atggacttaacttttaaaaagcaatatacagattggaattaaagtgtgatggtgtatgtgaatgagtaaaggc

SEQ ID NO: 194327 - DNA, 79 bp, Homo sapiens
taacttttaaaaagcaatatacagattggaattaaagtgtgatggtgtatgtgaatgagtaaaggctgagctcatcgca

SEQ ID NO: 194328 - DNA, 78 bp, Homo sapiens
aaaagcaatatacagattggaattaaagtgtgatggtgtatgtgaatgagtaaaggctgagctcatcgcacccggctt

SEQ ID NO: 194329 - DNA, 85 bp, Homo sapiens
atacagattggaattaaagtgtgatggtgtatgtgaatgagtaaaggctgagctcatcgcacccggctttgctgcctctgcatga

SEQ ID NO: 194330 - DNA, 85 bp, Homo sapiens
ttaaagtgtgatggtgtatgtgaatgagtaaaggctgagctcatcgcacccggctttgctgcctctgcatgatccttatagctaa

SEQ ID NO: 194331 - DNA, 84 bp, Homo sapiens
tggtgtatgtgaatgagtaaaggctgagctcatcgcacccggctttgctgcctctgcatgatccttatagctaatgaggttagt

SEQ ID NO: 194332 - DNA, 80 bp, Homo sapiens
gtaaaggctgagctcatcgcacccggctttgctgcctctgcatgatccttatagctaatgaggttagttcctaaaatgaa

SEQ ID NO: 194333 - DNA, 77 bp, Homo sapiens
atcgcacccggctttgctgcctctgcatgatccttatagctaatgaggttagttcctaaaatgaacctcacaggtgt

SEQ ID NO: 194334 - DNA, 75 bp, Homo sapiens
acccggctttgctgcctctgcatgatccttatagctaatgaggttagttcctaaaatgaacctcacaggtgttag

SEQ ID NO: 194335 - DNA, 77 bp, Homo sapiens
cctctgcatgatccttatagctaatgaggttagttcctaaaatgaacctcacaggtgttaggctgggatgtggccca

SEQ ID NO: 194336 - DNA, 75 bp, Homo sapiens
atgatccttatagctaatgaggttagttcctaaaatgaacctcacaggtgttaggctgggatgtggcccaggata

SEQ ID NO: 194337 - DNA, 69 bp, Homo sapiens
aggttagttcctaaaatgaacctcacaggtgttaggctgggatgtggcccaggatacctctcccctatt

SEQ ID NO: 194338 - DNA, 72 bp, Homo sapiens
aaatgaacctcacaggtgttaggctgggatgtggcccaggatacctctcccctatttcctcacaacccagat

SEQ ID NO: 194339 - DNA, 74 bp, Homo sapiens
ctcacaggtgttaggctgggatgtggcccaggatacctctcccctatttcctcacaacccagattggggctcag

SEQ ID NO: 194340 - DNA, 72 bp, Homo sapiens
gctgggatgtggcccaggatacctctcccctatttcctcacaacccagattggggctcaggcacccggttac

SEQ ID NO: 194341 - DNA, 73 bp, Homo sapiens
tggcccaggatacctctcccctatttcctcacaacccagattggggctcaggcacccggttaccagacatgat

SEQ ID NO: 194342 - DNA, 74 bp, Homo sapiens
atacctctcccctatttcctcacaacccagattggggctcaggcacccggttaccagacatgattgaagctaca

SEQ ID NO: 194343 - DNA, 74 bp, Homo sapiens
ctatttcctcacaacccagattggggctcaggcacccggttaccagacatgattgaagctacaggtttcctcag

SEQ ID NO: 194344 - DNA, 74 bp, Homo sapiens
cctcacaacccagattggggctcaggcacccggttaccagacatgattgaagctacaggtttcctcaggccctc

SEQ ID NO: 194345 - DNA, 73 bp, Homo sapiens
agattggggctcaggcacccggttaccagacatgattgaagctacaggtttcctcaggccctccgcttaccag

SEQ ID NO: 194346 - DNA, 72 bp, Homo sapiens
ctcaggcacccggttaccagacatgattgaagctacaggtttcctcaggccctccgcttaccaggtagaccc

SEQ ID NO: 194347 - DNA, 75 bp, Homo sapiens
ttaccagacatgattgaagctacaggtttcctcaggccctccgcttaccaggtagaccccatcagtgccctgaaa

SEQ ID NO: 194348 - DNA, 73 bp, Homo sapiens
acatgattgaagctacaggtttcctcaggccctccgcttaccaggtagaccccatcagtgccctgaaactttc

SEQ ID NO: 194349 - DNA, 76 bp, Homo sapiens
tcaggccctccgcttaccaggtagaccccatcagtgccctgaaactttcccagtcagcagggcattcagcaccttc

SEQ ID NO: 194350 - DNA, 76 bp, Homo sapiens
tccgcttaccaggtagaccccatcagtgccctgaaactttcccagtcagcagggcattcagcaccttccagatttg

SEQ ID NO: 194351 - DNA, 75 bp, Homo sapiens
aggtagaccccatcagtgccctgaaactttcccagtcagcagggcattcagcaccttccagatttggaggcttct

SEQ ID NO: 194352 - DNA, 77 bp, Homo sapiens
atcagtgccctgaaactttcccagtcagcagggcattcagcaccttccagatttggaggcttcttctgtccctaata

SEQ ID NO: 194353 - DNA, 77 bp, Homo sapiens
agggcattcagcaccttccagatttggaggcttcttctgtccctaatagctgggatcagaagctctcaggggtccag

SEQ ID NO: 194354 - DNA, 78 bp, Homo sapiens
agatttggaggcttcttctgtccctaatagctgggatcagaagctctcaggggtccaggcatgagggttatattctga

SEQ ID NO: 194355 - DNA, 77 bp, Homo sapiens
ttcttctgtccctaatagctgggatcagaagctctcaggggtccaggcatgagggttatattctgaggggtcggcac

SEQ ID NO: 194356 - DNA, 78 bp, Homo sapiens
taatagctgggatcagaagctctcaggggtccaggcatgagggttatattctgaggggtcggcacctagtgggctcca

SEQ ID NO: 194357 - DNA, 73 bp, Homo sapiens
aagctctcaggggtccaggcatgagggttatattctgaggggtcggcacctagtgggctccacgaagggataa

SEQ ID NO: 194358 - DNA, 74 bp, Homo sapiens
ggtccaggcatgagggttatattctgaggggtcggcacctagtgggctccacgaagggataaggcctccagtga

SEQ ID NO: 194359 - DNA, 74 bp, Homo sapiens
atgagggttatattctgaggggtcggcacctagtgggctccacgaagggataaggcctccagtgaggagcttga

SEQ ID NO: 194360 - DNA, 75 bp, Homo sapiens
atattctgaggggtcggcacctagtgggctccacgaagggataaggcctccagtgaggagcttgacatcattaaa

SEQ ID NO: 194361 - DNA, 76 bp, Homo sapiens
ggtcggcacctagtgggctccacgaagggataaggcctccagtgaggagcttgacatcattaaatcctatgaggta

SEQ ID NO: 194362 - DNA, 76 bp, Homo sapiens
tgggctccacgaagggataaggcctccagtgaggagcttgacatcattaaatcctatgaggtaggtaatattgtta

SEQ ID NO: 194363 - DNA, 74 bp, Homo sapiens
ccacgaagggataaggcctccagtgaggagcttgacatcattaaatcctatgaggtaggtaatattgttagccc

SEQ ID NO: 194364 - DNA, 75 bp, Homo sapiens
ataaggcctccagtgaggagcttgacatcattaaatcctatgaggtaggtaatattgttagccccattttacaga

SEQ ID NO: 194365 - DNA, 69 bp, Homo sapiens
acttgcccaaggtcaaacaactagtaagtgataaaaagtgggaccagaacccataactgtctgtcccca

SEQ ID NO: 194366 - DNA, 73 bp, Homo sapiens
aaggtcaaacaactagtaagtgataaaaagtgggaccagaacccataactgtctgtccccagagctcatgctc

SEQ ID NO: 194367 - DNA, 74 bp, Homo sapiens
aacaactagtaagtgataaaaagtgggaccagaacccataactgtctgtccccagagctcatgctccactccta

SEQ ID NO: 194368 - DNA, 78 bp, Homo sapiens
ggaccagaacccataactgtctgtccccagagctcatgctccactcctagtgcctgaccaaatcctaccaatttgtca

SEQ ID NO: 194369 - DNA, 77 bp, Homo sapiens
acccataactgtctgtccccagagctcatgctccactcctagtgcctgaccaaatcctaccaatttgtcaaggtcta

SEQ ID NO: 194370 - DNA, 78 bp, Homo sapiens
ctgtccccagagctcatgctccactcctagtgcctgaccaaatcctaccaatttgtcaaggtctagcttaaatgtgac

SEQ ID NO: 194371 - DNA, 77 bp, Homo sapiens
agctcatgctccactcctagtgcctgaccaaatcctaccaatttgtcaaggtctagcttaaatgtgacctccaggaa

SEQ ID NO: 194372 - DNA, 75 bp, Homo sapiens
atgctccactcctagtgcctgaccaaatcctaccaatttgtcaaggtctagcttaaatgtgacctccaggaagcc

SEQ ID NO: 194373 - DNA, 72 bp, Homo sapiens
cctagtgcctgaccaaatcctaccaatttgtcaaggtctagcttaaatgtgacctccaggaagcctagaggg

SEQ ID NO: 194374 - DNA, 71 bp, Homo sapiens
aaatcctaccaatttgtcaaggtctagcttaaatgtgacctccaggaagcctagaggggatcacccacttc

SEQ ID NO: 194375 - DNA, 80 bp, Homo sapiens
tccaggaagcctagaggggatcacccacttctcaaattcaaagtacatatgacattcagctaactatagtcattcatgaa

SEQ ID NO: 194376 - DNA, 80 bp, Homo sapiens
tagaggggatcacccacttctcaaattcaaagtacatatgacattcagctaactatagtcattcatgaacccactgtatc

SEQ ID NO: 194377 - DNA, 80 bp, Homo sapiens
tcacccacttctcaaattcaaagtacatatgacattcagctaactatagtcattcatgaacccactgtatctccttacta

SEQ ID NO: 194378 - DNA, 79 bp, Homo sapiens
tcaaattcaaagtacatatgacattcagctaactatagtcattcatgaacccactgtatctccttactaggagggtaga

SEQ ID NO: 194379 - DNA, 80 bp, Homo sapiens
aaagtacatatgacattcagctaactatagtcattcatgaacccactgtatctccttactaggagggtagagatcatgtc

SEQ ID NO: 194380 - DNA, 82 bp, Homo sapiens
atatgacattcagctaactatagtcattcatgaacccactgtatctccttactaggagggtagagatcatgtctgattcaac

SEQ ID NO: 194381 - DNA, 79 bp, Homo sapiens
aactatagtcattcatgaacccactgtatctccttactaggagggtagagatcatgtctgattcaactctgtattccaa

SEQ ID NO: 194382 - DNA, 83 bp, Homo sapiens
tagtcattcatgaacccactgtatctccttactaggagggtagagatcatgtctgattcaactctgtattccaagcacagagc

SEQ ID NO: 194383 - DNA, 80 bp, Homo sapiens
acccactgtatctccttactaggagggtagagatcatgtctgattcaactctgtattccaagcacagagcctgacaaata

SEQ ID NO: 194384 - DNA, 80 bp, Homo sapiens
tatctccttactaggagggtagagatcatgtctgattcaactctgtattccaagcacagagcctgacaaatagagggtgt

SEQ ID NO: 194385 - DNA, 83 bp, Homo sapiens
atcatgtctgattcaactctgtattccaagcacagagcctgacaaatagagggtgttcggtatgtgtctgatgaatacataaa

SEQ ID NO: 194386 - DNA, 82 bp, Homo sapiens
gtctgattcaactctgtattccaagcacagagcctgacaaatagagggtgttcggtatgtgtctgatgaatacataaatgaa

SEQ ID NO: 194387 - DNA, 83 bp, Homo sapiens
tgtattccaagcacagagcctgacaaatagagggtgttcggtatgtgtctgatgaatacataaatgaatgaatacacaaatga

SEQ ID NO: 194388 - DNA, 83 bp, Homo sapiens
aagcacagagcctgacaaatagagggtgttcggtatgtgtctgatgaatacataaatgaatgaatacacaaatgagtgaatga

SEQ ID NO: 194389 - DNA, 82 bp, Homo sapiens
tgacaaatagagggtgttcggtatgtgtctgatgaatacataaatgaatgaatacacaaatgagtgaatgaaggcagtttca

SEQ ID NO: 194390 - DNA, 80 bp, Homo sapiens
atagagggtgttcggtatgtgtctgatgaatacataaatgaatgaatacacaaatgagtgaatgaaggcagtttcaggta

SEQ ID NO: 194391 - DNA, 82 bp, Homo sapiens
tatgtgtctgatgaatacataaatgaatgaatacacaaatgagtgaatgaaggcagtttcaggtaactgcctaagactccta

SEQ ID NO: 194392 - DNA, 79 bp, Homo sapiens
atgaatacataaatgaatgaatacacaaatgagtgaatgaaggcagtttcaggtaactgcctaagactcctatgaggtc

SEQ ID NO: 194393 - DNA, 75 bp, Homo sapiens
aatgaatacacaaatgagtgaatgaaggcagtttcaggtaactgcctaagactcctatgaggtcctgagtacctt

SEQ ID NO: 194394 - DNA, 76 bp, Homo sapiens
atgagtgaatgaaggcagtttcaggtaactgcctaagactcctatgaggtcctgagtacctttgcccagctcaggg

SEQ ID NO: 194395 - DNA, 75 bp, Homo sapiens
aatgaaggcagtttcaggtaactgcctaagactcctatgaggtcctgagtacctttgcccagctcaggggtgctg

SEQ ID NO: 194396 - DNA, 77 bp, Homo sapiens
ctaagactcctatgaggtcctgagtacctttgcccagctcaggggtgctgtcatcctaagctctcttggaatcaaat

SEQ ID NO: 194397 - DNA, 79 bp, Homo sapiens
ctcctatgaggtcctgagtacctttgcccagctcaggggtgctgtcatcctaagctctcttggaatcaaattcagccta

SEQ ID NO: 194398 - DNA, 78 bp, Homo sapiens
tgagtacctttgcccagctcaggggtgctgtcatcctaagctctcttggaatcaaattcagcctaggctccttctaaa

SEQ ID NO: 194399 - DNA, 75 bp, Homo sapiens
aggggtgctgtcatcctaagctctcttggaatcaaattcagcctaggctccttctaaaacaggtctccaatatcc

SEQ ID NO: 194400 - DNA, 74 bp, Homo sapiens
tcatcctaagctctcttggaatcaaattcagcctaggctccttctaaaacaggtctccaatatcctttattatt

SEQ ID NO: 194401 - DNA, 74 bp, Homo sapiens
taagctctcttggaatcaaattcagcctaggctccttctaaaacaggtctccaatatcctttattattttgcaa

SEQ ID NO: 194402 - DNA, 74 bp, Homo sapiens
ttggaatcaaattcagcctaggctccttctaaaacaggtctccaatatcctttattattttgcaaacatactca

SEQ ID NO: 194403 - DNA, 78 bp, Homo sapiens
agcctaggctccttctaaaacaggtctccaatatcctttattattttgcaaacatactcacatgcacacatgcggata

SEQ ID NO: 194404 - DNA, 80 bp, Homo sapiens
ctccttctaaaacaggtctccaatatcctttattattttgcaaacatactcacatgcacacatgcggatacatacataca

SEQ ID NO: 194405 - DNA, 75 bp, Homo sapiens
cacacatacatacccacacacacagtgggcaagaggcccaaggggcccacgattatgggtgatgagggggaggaa

SEQ ID NO: 194406 - DNA, 72 bp, Homo sapiens
atacatacccacacacacagtgggcaagaggcccaaggggcccacgattatgggtgatgagggggaggaagg

SEQ ID NO: 194407 - DNA, 73 bp, Homo sapiens
cacagtgggcaagaggcccaaggggcccacgattatgggtgatgagggggaggaagggggtgtgtgtgatgaa

SEQ ID NO: 194408 - DNA, 72 bp, Homo sapiens
aagaggcccaaggggcccacgattatgggtgatgagggggaggaagggggtgtgtgtgatgaacagatggcc

SEQ ID NO: 194409 - DNA, 75 bp, Homo sapiens
aaggggcccacgattatgggtgatgagggggaggaagggggtgtgtgtgatgaacagatggccctgttcagctca

SEQ ID NO: 194410 - DNA, 79 bp, Homo sapiens
gattatgggtgatgagggggaggaagggggtgtgtgtgatgaacagatggccctgttcagctcagcacctcctttcaga

SEQ ID NO: 194411 - DNA, 80 bp, Homo sapiens
tgatgagggggaggaagggggtgtgtgtgatgaacagatggccctgttcagctcagcacctcctttcagaggccagaata

SEQ ID NO: 194412 - DNA, 78 bp, Homo sapiens
aggaagggggtgtgtgtgatgaacagatggccctgttcagctcagcacctcctttcagaggccagaatactccctgtc

SEQ ID NO: 194413 - DNA, 80 bp, Homo sapiens
tgtgtgtgatgaacagatggccctgttcagctcagcacctcctttcagaggccagaatactccctgtcgttcaggaattt

SEQ ID NO: 194414 - DNA, 78 bp, Homo sapiens
atgaacagatggccctgttcagctcagcacctcctttcagaggccagaatactccctgtcgttcaggaatttttgctc

SEQ ID NO: 194415 - DNA, 75 bp, Homo sapiens
ccctgttcagctcagcacctcctttcagaggccagaatactccctgtcgttcaggaatttttgctccagacctaa

SEQ ID NO: 194416 - DNA, 77 bp, Homo sapiens
ttcagctcagcacctcctttcagaggccagaatactccctgtcgttcaggaatttttgctccagacctaacatcacc

SEQ ID NO: 194417 - DNA, 74 bp, Homo sapiens
tcctttcagaggccagaatactccctgtcgttcaggaatttttgctccagacctaacatcacctctgttcctct

SEQ ID NO: 194418 - DNA, 77 bp, Homo sapiens
ggccagaatactccctgtcgttcaggaatttttgctccagacctaacatcacctctgttcctcttcatgcttgatta

SEQ ID NO: 194419 - DNA, 77 bp, Homo sapiens
agaatactccctgtcgttcaggaatttttgctccagacctaacatcacctctgttcctcttcatgcttgattagcag

SEQ ID NO: 194420 - DNA, 78 bp, Homo sapiens
aatactccctgtcgttcaggaatttttgctccagacctaacatcacctctgttcctcttcatgcttgattagcagtgc

SEQ ID NO: 194421 - DNA, 79 bp, Homo sapiens
tgtcgttcaggaatttttgctccagacctaacatcacctctgttcctcttcatgcttgattagcagtgcctaaatccca

SEQ ID NO: 194422 - DNA, 80 bp, Homo sapiens
ttcaggaatttttgctccagacctaacatcacctctgttcctcttcatgcttgattagcagtgcctaaatcccatgacta

SEQ ID NO: 194423 - DNA, 79 bp, Homo sapiens
aatttttgctccagacctaacatcacctctgttcctcttcatgcttgattagcagtgcctaaatcccatgactacacca

SEQ ID NO: 194424 - DNA, 79 bp, Homo sapiens
atttttgctccagacctaacatcacctctgttcctcttcatgcttgattagcagtgcctaaatcccatgactacaccaa

SEQ ID NO: 194425 - DNA, 79 bp, Homo sapiens
ttgctccagacctaacatcacctctgttcctcttcatgcttgattagcagtgcctaaatcccatgactacaccaaaaag

SEQ ID NO: 194426 - DNA, 77 bp, Homo sapiens
agacctaacatcacctctgttcctcttcatgcttgattagcagtgcctaaatcccatgactacaccaaaaagggcca

SEQ ID NO: 194427 - DNA, 77 bp, Homo sapiens
cctaacatcacctctgttcctcttcatgcttgattagcagtgcctaaatcccatgactacaccaaaaagggccagga

SEQ ID NO: 194428 - DNA, 76 bp, Homo sapiens
atcacctctgttcctcttcatgcttgattagcagtgcctaaatcccatgactacaccaaaaagggccaggaggtag

SEQ ID NO: 194429 - DNA, 74 bp, Homo sapiens
cctctgttcctcttcatgcttgattagcagtgcctaaatcccatgactacaccaaaaagggccaggaggtaggg

SEQ ID NO: 194430 - DNA, 73 bp, Homo sapiens
tcttcatgcttgattagcagtgcctaaatcccatgactacaccaaaaagggccaggaggtagggggaaggttg

SEQ ID NO: 194431 - DNA, 70 bp, Homo sapiens
tagcagtgcctaaatcccatgactacaccaaaaagggccaggaggtagggggaaggttgggagtcaaata

SEQ ID NO: 194432 - DNA, 69 bp, Homo sapiens
taaatcccatgactacaccaaaaagggccaggaggtagggggaaggttgggagtcaaatatccagagat

SEQ ID NO: 194433 - DNA, 69 bp, Homo sapiens
atgactacaccaaaaagggccaggaggtagggggaaggttgggagtcaaatatccagagattgggagag

SEQ ID NO: 194434 - DNA, 68 bp, Homo sapiens
aaaaagggccaggaggtagggggaaggttgggagtcaaatatccagagattgggagagggacagctta

SEQ ID NO: 194435 - DNA, 71 bp, Homo sapiens
aggaggtagggggaaggttgggagtcaaatatccagagattgggagagggacagcttagggatccagacag

SEQ ID NO: 194436 - DNA, 73 bp, Homo sapiens
gaaggttgggagtcaaatatccagagattgggagagggacagcttagggatccagacagggcgggagggcaaa

SEQ ID NO: 194437 - DNA, 74 bp, Homo sapiens
agtcaaatatccagagattgggagagggacagcttagggatccagacagggcgggagggcaaaaatactgctac

SEQ ID NO: 194438 - DNA, 76 bp, Homo sapiens
aatatccagagattgggagagggacagcttagggatccagacagggcgggagggcaaaaatactgctactgctcat

SEQ ID NO: 194439 - DNA, 73 bp, Homo sapiens
attgggagagggacagcttagggatccagacagggcgggagggcaaaaatactgctactgctcattggggttg

SEQ ID NO: 194440 - DNA, 74 bp, Homo sapiens
acagcttagggatccagacagggcgggagggcaaaaatactgctactgctcattggggttggggttggcatctg

SEQ ID NO: 194441 - DNA, 72 bp, Homo sapiens
atccagacagggcgggagggcaaaaatactgctactgctcattggggttggggttggcatctgggtacttgg

SEQ ID NO: 194442 - DNA, 72 bp, Homo sapiens
gcgggagggcaaaaatactgctactgctcattggggttggggttggcatctgggtacttggtgaggtcgaag

SEQ ID NO: 194443 - DNA, 71 bp, Homo sapiens
aaaaatactgctactgctcattggggttggggttggcatctgggtacttggtgaggtcgaaggtcaggact

SEQ ID NO: 194444 - DNA, 78 bp, Homo sapiens
tactgctactgctcattggggttggggttggcatctgggtacttggtgaggtcgaaggtcaggactttgctgatcaca

SEQ ID NO: 194445 - DNA, 74 bp, Homo sapiens
ctcattggggttggggttggcatctgggtacttggtgaggtcgaaggtcaggactttgctgatcacacagtccc

SEQ ID NO: 194446 - DNA, 76 bp, Homo sapiens
gggttggcatctgggtacttggtgaggtcgaaggtcaggactttgctgatcacacagtccccttgctgaaggagga

SEQ ID NO: 194447 - DNA, 77 bp, Homo sapiens
aaatcaggcagggagtaggactggctcctgagccaggcccgccctacctcaggatagactccaatgaggctctcggc

SEQ ID NO: 194448 - DNA, 77 bp, Homo sapiens
ggagtaggactggctcctgagccaggcccgccctacctcaggatagactccaatgaggctctcggccttggtgtaga

SEQ ID NO: 194449 - DNA, 76 bp, Homo sapiens
aggactggctcctgagccaggcccgccctacctcaggatagactccaatgaggctctcggccttggtgtagaactc

SEQ ID NO: 194450 - DNA, 76 bp, Homo sapiens
agccaggcccgccctacctcaggatagactccaatgaggctctcggccttggtgtagaactcctccttgagagaga

SEQ ID NO: 194451 - DNA, 78 bp, Homo sapiens
ccctacctcaggatagactccaatgaggctctcggccttggtgtagaactcctccttgagagagatgacgatggcctg

SEQ ID NO: 194452 - DNA, 79 bp, Homo sapiens
aggatagactccaatgaggctctcggccttggtgtagaactcctccttgagagagatgacgatggcctggaagttgcaa

SEQ ID NO: 194453 - DNA, 78 bp, Homo sapiens
actccaatgaggctctcggccttggtgtagaactcctccttgagagagatgacgatggcctggaagttgcaagtcgac

SEQ ID NO: 194454 - DNA, 80 bp, Homo sapiens
tctcggccttggtgtagaactcctccttgagagagatgacgatggcctggaagttgcaagtcgactgctccttgatgtaa

SEQ ID NO: 194455 - DNA, 79 bp, Homo sapiens
ccttggtgtagaactcctccttgagagagatgacgatggcctggaagttgcaagtcgactgctccttgatgtaatttgc

SEQ ID NO: 194456 - DNA, 79 bp, Homo sapiens
tcctccttgagagagatgacgatggcctggaagttgcaagtcgactgctccttgatgtaatttgccacctgtgggaaag

SEQ ID NO: 194457 - DNA, 80 bp, Homo sapiens
ttgagagagatgacgatggcctggaagttgcaagtcgactgctccttgatgtaatttgccacctgtgggaaaggccgcca

SEQ ID NO: 194458 - DNA, 77 bp, Homo sapiens
atggcctggaagttgcaagtcgactgctccttgatgtaatttgccacctgtgggaaaggccgccaggcacttagcaa

SEQ ID NO: 194459 - DNA, 76 bp, Homo sapiens
aagttgcaagtcgactgctccttgatgtaatttgccacctgtgggaaaggccgccaggcacttagcaaggctcaaa

SEQ ID NO: 194460 - DNA, 65 bp, Homo sapiens
ctccctgaaacccaaccccgacctgggggcatccctcccaggccccactttctttgcacccacct

SEQ ID NO: 194461 - DNA, 66 bp, Homo sapiens
aaacccaaccccgacctgggggcatccctcccaggccccactttctttgcacccaccttgccaatg

SEQ ID NO: 194462 - DNA, 71 bp, Homo sapiens
acctgggggcatccctcccaggccccactttctttgcacccaccttgccaatgttggtgttatccaaggca

SEQ ID NO: 194463 - DNA, 77 bp, Homo sapiens
atccctcccaggccccactttctttgcacccaccttgccaatgttggtgttatccaaggcagcatcaatctcatcca

SEQ ID NO: 194464 - DNA, 76 bp, Homo sapiens
ccccactttctttgcacccaccttgccaatgttggtgttatccaaggcagcatcaatctcatccaggacgaagaag

SEQ ID NO: 194465 - DNA, 77 bp, Homo sapiens
tttctttgcacccaccttgccaatgttggtgttatccaaggcagcatcaatctcatccaggacgaagaagggggctg

SEQ ID NO: 194466 - DNA, 78 bp, Homo sapiens
accttgccaatgttggtgttatccaaggcagcatcaatctcatccaggacgaagaagggggctggcttgtagctggga

SEQ ID NO: 194467 - DNA, 76 bp, Homo sapiens
aatgttggtgttatccaaggcagcatcaatctcatccaggacgaagaagggggctggcttgtagctgggagggaac

SEQ ID NO: 194468 - DNA, 78 bp, Homo sapiens
tgttatccaaggcagcatcaatctcatccaggacgaagaagggggctggcttgtagctgggagggaaccagtaggtga

SEQ ID NO: 194469 - DNA, 79 bp, Homo sapiens
agcatcaatctcatccaggacgaagaagggggctggcttgtagctgggagggaaccagtaggtgagctgacactgaggc

SEQ ID NO: 194470 - DNA, 75 bp, Homo sapiens
atctcatccaggacgaagaagggggctggcttgtagctgggagggaaccagtaggtgagctgacactgaggcggg

SEQ ID NO: 194471 - DNA, 71 bp, Homo sapiens
ggacgaagaagggggctggcttgtagctgggagggaaccagtaggtgagctgacactgaggcggggagggg

SEQ ID NO: 194472 - DNA, 78 bp, Homo sapiens
ggtggcctcagttcagtctcttcgtcaactgccctaggggatcagccttacctgtggatggcaaagagcagggccaga

SEQ ID NO: 194473 - DNA, 80 bp, Homo sapiens
ttcagtctcttcgtcaactgccctaggggatcagccttacctgtggatggcaaagagcagggccagagctgccactgtct

SEQ ID NO: 194474 - DNA, 78 bp, Homo sapiens
ttcgtcaactgccctaggggatcagccttacctgtggatggcaaagagcagggccagagctgccactgtcttctcccc

SEQ ID NO: 194475 - DNA, 79 bp, Homo sapiens
taggggatcagccttacctgtggatggcaaagagcagggccagagctgccactgtcttctccccgcctgacaagttgtc

SEQ ID NO: 194476 - DNA, 80 bp, Homo sapiens
atcagccttacctgtggatggcaaagagcagggccagagctgccactgtcttctccccgcctgacaagttgtccataggc

SEQ ID NO: 194477 - DNA, 78 bp, Homo sapiens
tggatggcaaagagcagggccagagctgccactgtcttctccccgcctgacaagttgtccataggccggaagcgtttc

SEQ ID NO: 194478 - DNA, 74 bp, Homo sapiens
aaagagcagggccagagctgccactgtcttctccccgcctgacaagttgtccataggccggaagcgtttcccag

SEQ ID NO: 194479 - DNA, 75 bp, Homo sapiens
agagctgccactgtcttctccccgcctgacaagttgtccataggccggaagcgtttcccaggagccacacagttg

SEQ ID NO: 194480 - DNA, 73 bp, Homo sapiens
actgtcttctccccgcctgacaagttgtccataggccggaagcgtttcccaggagccacacagttgtagttga

SEQ ID NO: 194481 - DNA, 75 bp, Homo sapiens
cccgcctgacaagttgtccataggccggaagcgtttcccaggagccacacagttgtagttgatgccatccaagta

SEQ ID NO: 194482 - DNA, 75 bp, Homo sapiens
ataggccggaagcgtttcccaggagccacacagttgtagttgatgccatccaagtagggctcttcagggttctca

SEQ ID NO: 194483 - DNA, 74 bp, Homo sapiens
aagcgtttcccaggagccacacagttgtagttgatgccatccaagtagggctcttcagggttctcagggcccag

SEQ ID NO: 194484 - DNA, 75 bp, Homo sapiens
aggagccacacagttgtagttgatgccatccaagtagggctcttcagggttctcagggcccaggaatgcctaggg

SEQ ID NO: 194485 - DNA, 75 bp, Homo sapiens
acacagttgtagttgatgccatccaagtagggctcttcagggttctcagggcccaggaatgcctaggggaaggca

SEQ ID NO: 194486 - DNA, 76 bp, Homo sapiens
tagttgatgccatccaagtagggctcttcagggttctcagggcccaggaatgcctaggggaaggcagatgggtcag

SEQ ID NO: 194487 - DNA, 76 bp, Homo sapiens
aagtagggctcttcagggttctcagggcccaggaatgcctaggggaaggcagatgggtcaggatctgtatctgaga

SEQ ID NO: 194488 - DNA, 75 bp, Homo sapiens
aaggacaactgaggatggtagcagctggttgggtaaggggctccagcctacctgggcactgctattgcgggacag

SEQ ID NO: 194489 - DNA, 77 bp, Homo sapiens
atggtagcagctggttgggtaaggggctccagcctacctgggcactgctattgcgggacagggccttatagatctca

SEQ ID NO: 194490 - DNA, 76 bp, Homo sapiens
agctggttgggtaaggggctccagcctacctgggcactgctattgcgggacagggccttatagatctcatcaatgt

SEQ ID NO: 194491 - DNA, 79 bp, Homo sapiens
taaggggctccagcctacctgggcactgctattgcgggacagggccttatagatctcatcaatgttggtagccacagat

SEQ ID NO: 194492 - DNA, 80 bp, Homo sapiens
tccagcctacctgggcactgctattgcgggacagggccttatagatctcatcaatgttggtagccacagattcaaaacaa

SEQ ID NO: 194493 - DNA, 82 bp, Homo sapiens
gcactgctattgcgggacagggccttatagatctcatcaatgttggtagccacagattcaaaacaagcattgaagcggtcaa

SEQ ID NO: 194494 - DNA, 79 bp, Homo sapiens
ctattgcgggacagggccttatagatctcatcaatgttggtagccacagattcaaaacaagcattgaagcggtcaaagc

SEQ ID NO: 194495 - DNA, 79 bp, Homo sapiens
agggccttatagatctcatcaatgttggtagccacagattcaaaacaagcattgaagcggtcaaagcgctccttcttga

SEQ ID NO: 194496 - DNA, 82 bp, Homo sapiens
tatagatctcatcaatgttggtagccacagattcaaaacaagcattgaagcggtcaaagcgctccttcttgatctgttcgaa

SEQ ID NO: 194497 - DNA, 80 bp, Homo sapiens
atcaatgttggtagccacagattcaaaacaagcattgaagcggtcaaagcgctccttcttgatctgttcgaatgcctgct

SEQ ID NO: 194498 - DNA, 79 bp, Homo sapiens
tagccacagattcaaaacaagcattgaagcggtcaaagcgctccttcttgatctgttcgaatgcctgcttggccttctt

SEQ ID NO: 194499 - DNA, 77 bp, Homo sapiens
aaaacaagcattgaagcggtcaaagcgctccttcttgatctgttcgaatgcctgcttggccttctttgctcgctttc

SEQ ID NO: 194500 - DNA, 79 bp, Homo sapiens
attgaagcggtcaaagcgctccttcttgatctgttcgaatgcctgcttggccttctttgctcgctttcgggctgcttca

SEQ ID NO: 194501 - DNA, 77 bp, Homo sapiens
cggtcaaagcgctccttcttgatctgttcgaatgcctgcttggccttctttgctcgctttcgggctgcttcaaactc

SEQ ID NO: 194502 - DNA, 78 bp, Homo sapiens
tccttcttgatctgttcgaatgcctgcttggccttctttgctcgctttcgggctgcttcaaactctgccagaaagaaa

SEQ ID NO: 194503 - DNA, 78 bp, Homo sapiens
atctgttcgaatgcctgcttggccttctttgctcgctttcgggctgcttcaaactctgccagaaagaaagacaggaga

SEQ ID NO: 194504 - DNA, 76 bp, Homo sapiens
aatgcctgcttggccttctttgctcgctttcgggctgcttcaaactctgccagaaagaaagacaggagacccctca

SEQ ID NO: 194505 - DNA, 73 bp, Homo sapiens
ttagcctcttgtcctcatcgtaggcccaagtagaagggtaaatcttaccatctgaggtctcctggaacttgtc

SEQ ID NO: 194506 - DNA, 72 bp, Homo sapiens
tcctcatcgtaggcccaagtagaagggtaaatcttaccatctgaggtctcctggaacttgtctcggacactt

SEQ ID NO: 194507 - DNA, 71 bp, Homo sapiens
taggcccaagtagaagggtaaatcttaccatctgaggtctcctggaacttgtctcggacactttccagctt

SEQ ID NO: 194508 - DNA, 71 bp, Homo sapiens
aagtagaagggtaaatcttaccatctgaggtctcctggaacttgtctcggacactttccagcttttccatg

SEQ ID NO: 194509 - DNA, 74 bp, Homo sapiens
taaatcttaccatctgaggtctcctggaacttgtctcggacactttccagcttttccatggccttcatgttggg

SEQ ID NO: 194510 - DNA, 74 bp, Homo sapiens
atctgaggtctcctggaacttgtctcggacactttccagcttttccatggccttcatgttgggggcggcaatac

SEQ ID NO: 194511 - DNA, 76 bp, Homo sapiens
ctggaacttgtctcggacactttccagcttttccatggccttcatgttgggggcggcaatacgctgaagcacactc

SEQ ID NO: 194512 - DNA, 82 bp, Homo sapiens
ttgtctcggacactttccagcttttccatggccttcatgttgggggcggcaatacgctgaagcacactctgctgctcattca

SEQ ID NO: 194513 - DNA, 85 bp, Homo sapiens
acactttccagcttttccatggccttcatgttgggggcggcaatacgctgaagcacactctgctgctcattcagcttctgctgca

SEQ ID NO: 194514 - DNA, 87 bp, Homo sapiens
ttttccatggccttcatgttgggggcggcaatacgctgaagcacactctgctgctcattcagcttctgctgcagtgtgttcatctct

SEQ ID NO: 194515 - DNA, 90 bp, Homo sapiens
cttcatgttgggggcggcaatacgctgaagcacactctgctgctcattcagcttctgctgcagtgtgttcatctcttgcttgatctcttc

SEQ ID NO: 194516 - DNA, 93 bp, Homo sapiens
ggcggcaatacgctgaagcacactctgctgctcattcagcttctgctgcagtgtgttcatctcttgcttgatctcttcctcagcctgggcatc

SEQ ID NO: 194517 - DNA, 92 bp, Homo sapiens
aatacgctgaagcacactctgctgctcattcagcttctgctgcagtgtgttcatctcttgcttgatctcttcctcagcctgggcatcctgta

SEQ ID NO: 194518 - DNA, 90 bp, Homo sapiens
aagcacactctgctgctcattcagcttctgctgcagtgtgttcatctcttgcttgatctcttcctcagcctgggcatcctgtaagcccca

SEQ ID NO: 194519 - DNA, 87 bp, Homo sapiens
ctcattcagcttctgctgcagtgtgttcatctcttgcttgatctcttcctcagcctgggcatcctgtaagccccaggcccagcaatg

SEQ ID NO: 194520 - DNA, 85 bp, Homo sapiens
cttctgctgcagtgtgttcatctcttgcttgatctcttcctcagcctgggcatcctgtaagccccaggcccagcaatgtcaagaa

SEQ ID NO: 194521 - DNA, 80 bp, Homo sapiens
agtgtgttcatctcttgcttgatctcttcctcagcctgggcatcctgtaagccccaggcccagcaatgtcaagaagggcc

SEQ ID NO: 194522 - DNA, 72 bp, Homo sapiens
actcccacccaacccccacccccaccacacccctgtggttgatcctcaccttcagatcctcacacagatcac

SEQ ID NO: 194523 - DNA, 77 bp, Homo sapiens
ccccacccccaccacacccctgtggttgatcctcaccttcagatcctcacacagatcaccgtagtcaatctcaatga

SEQ ID NO: 194524 - DNA, 81 bp, Homo sapiens
accacacccctgtggttgatcctcaccttcagatcctcacacagatcaccgtagtcaatctcaatgagggcctctcgtgca

SEQ ID NO: 194525 - DNA, 84 bp, Homo sapiens
tgtggttgatcctcaccttcagatcctcacacagatcaccgtagtcaatctcaatgagggcctctcgtgcatagatactggaaa

SEQ ID NO: 194526 - DNA, 83 bp, Homo sapiens
atcctcaccttcagatcctcacacagatcaccgtagtcaatctcaatgagggcctctcgtgcatagatactggaaattctctg

SEQ ID NO: 194527 - DNA, 85 bp, Homo sapiens
ttcagatcctcacacagatcaccgtagtcaatctcaatgagggcctctcgtgcatagatactggaaattctctgtgaaccactca

SEQ ID NO: 194528 - DNA, 82 bp, Homo sapiens
acacagatcaccgtagtcaatctcaatgagggcctctcgtgcatagatactggaaattctctgtgaaccactcactgagtcc

SEQ ID NO: 194529 - DNA, 78 bp, Homo sapiens
accgtagtcaatctcaatgagggcctctcgtgcatagatactggaaattctctgtgaaccactcactgagtcctcccc

SEQ ID NO: 194530 - DNA, 79 bp, Homo sapiens
aatctcaatgagggcctctcgtgcatagatactggaaattctctgtgaaccactcactgagtcctccccctgggagcta

SEQ ID NO: 194531 - DNA, 79 bp, Homo sapiens
cctctcgtgcatagatactggaaattctctgtgaaccactcactgagtcctccccctgggagctaccctgcaatggcaa

SEQ ID NO: 194532 - DNA, 76 bp, Homo sapiens
atagatactggaaattctctgtgaaccactcactgagtcctccccctgggagctaccctgcaatggcaacggagag

SEQ ID NO: 194533 - DNA, 76 bp, Homo sapiens
tactggaaattctctgtgaaccactcactgagtcctccccctgggagctaccctgcaatggcaacggagagtcaag

SEQ ID NO: 194534 - DNA, 79 bp, Homo sapiens
ttaatgatgttcatcgcccactcccaccaccagccacaatactcacctcttcctgactaatatcatccatggtgccttt

SEQ ID NO: 194535 - DNA, 79 bp, Homo sapiens
atgttcatcgcccactcccaccaccagccacaatactcacctcttcctgactaatatcatccatggtgccttttgacag

SEQ ID NO: 194536 - DNA, 77 bp, Homo sapiens
actcccaccaccagccacaatactcacctcttcctgactaatatcatccatggtgccttttgacagtggcaacttaa

SEQ ID NO: 194537 - DNA, 82 bp, Homo sapiens
cagccacaatactcacctcttcctgactaatatcatccatggtgccttttgacagtggcaacttaatgtcctgcatcttaca

SEQ ID NO: 194538 - DNA, 80 bp, Homo sapiens
acaatactcacctcttcctgactaatatcatccatggtgccttttgacagtggcaacttaatgtcctgcatcttacaggc

SEQ ID NO: 194539 - DNA, 82 bp, Homo sapiens
ttcctgactaatatcatccatggtgccttttgacagtggcaacttaatgtcctgcatcttacaggcctgtagcaagttgtga

SEQ ID NO: 194540 - DNA, 81 bp, Homo sapiens
taatatcatccatggtgccttttgacagtggcaacttaatgtcctgcatcttacaggcctgtagcaagttgtgacggtcac

SEQ ID NO: 194541 - DNA, 80 bp, Homo sapiens
tggtgccttttgacagtggcaacttaatgtcctgcatcttacaggcctgtagcaagttgtgacggtcactgcgcttctgt

SEQ ID NO: 194542 - DNA, 80 bp, Homo sapiens
ttttgacagtggcaacttaatgtcctgcatcttacaggcctgtagcaagttgtgacggtcactgcgcttctgttcaagct

SEQ ID NO: 194543 - DNA, 80 bp, Homo sapiens
aacttaatgtcctgcatcttacaggcctgtagcaagttgtgacggtcactgcgcttctgttcaagcttggtctcaatggc

SEQ ID NO: 194544 - DNA, 83 bp, Homo sapiens
atgtcctgcatcttacaggcctgtagcaagttgtgacggtcactgcgcttctgttcaagcttggtctcaatggctgtcacctc

SEQ ID NO: 194545 - DNA, 80 bp, Homo sapiens
ttacaggcctgtagcaagttgtgacggtcactgcgcttctgttcaagcttggtctcaatggctgtcacctccttctgtaa

SEQ ID NO: 194546 - DNA, 79 bp, Homo sapiens
tagcaagttgtgacggtcactgcgcttctgttcaagcttggtctcaatggctgtcacctccttctgtaaatgggtcatt

SEQ ID NO: 194547 - DNA, 75 bp, Homo sapiens
acggtcactgcgcttctgttcaagcttggtctcaatggctgtcacctccttctgtaaatgggtcatttccctaaa

SEQ ID NO: 194548 - DNA, 73 bp, Homo sapiens
actgcgcttctgttcaagcttggtctcaatggctgtcacctccttctgtaaatgggtcatttccctaaaaaag

SEQ ID NO: 194549 - DNA, 71 bp, Homo sapiens
ctgttcaagcttggtctcaatggctgtcacctccttctgtaaatgggtcatttccctaaaaaaggtccagg

SEQ ID NO: 194550 - DNA, 71 bp, Homo sapiens
ttggtctcaatggctgtcacctccttctgtaaatgggtcatttccctaaaaaaggtccaggggctaggtga

SEQ ID NO: 194551 - DNA, 72 bp, Homo sapiens
tgcctgctctatctacgtcctcccaccccaggcctgaacccactcacttgttggcgcccccgagtttcttac

SEQ ID NO: 194552 - DNA, 70 bp, Homo sapiens
tctatctacgtcctcccaccccaggcctgaacccactcacttgttggcgcccccgagtttcttacgaatc

SEQ ID NO: 194553 - DNA, 72 bp, Homo sapiens
cccaccccaggcctgaacccactcacttgttggcgcccccgagtttcttacgaatctcctccatctcatgat

SEQ ID NO: 194554 - DNA, 76 bp, Homo sapiens
aggcctgaacccactcacttgttggcgcccccgagtttcttacgaatctcctccatctcatgattcttgtcattca

SEQ ID NO: 194555 - DNA, 75 bp, Homo sapiens
actcacttgttggcgcccccgagtttcttacgaatctcctccatctcatgattcttgtcattcacttccgacttc

SEQ ID NO: 194556 - DNA, 76 bp, Homo sapiens
ttgttggcgcccccgagtttcttacgaatctcctccatctcatgattcttgtcattcacttccgacttcttggcca

SEQ ID NO: 194557 - DNA, 80 bp, Homo sapiens
cccgagtttcttacgaatctcctccatctcatgattcttgtcattcacttccgacttcttggccagatgctgattcttca

SEQ ID NO: 194558 - DNA, 84 bp, Homo sapiens
ttacgaatctcctccatctcatgattcttgtcattcacttccgacttcttggccagatgctgattcttcaggtcttgtagctga

SEQ ID NO: 194559 - DNA, 88 bp, Homo sapiens
tccatctcatgattcttgtcattcacttccgacttcttggccagatgctgattcttcaggtcttgtagctgagccatggtctcatcta

SEQ ID NO: 194560 - DNA, 86 bp, Homo sapiens
attcttgtcattcacttccgacttcttggccagatgctgattcttcaggtcttgtagctgagccatggtctcatctatgatcttca

SEQ ID NO: 194561 - DNA, 85 bp, Homo sapiens
attcacttccgacttcttggccagatgctgattcttcaggtcttgtagctgagccatggtctcatctatgatcttcatgtgtctt

SEQ ID NO: 194562 - DNA, 85 bp, Homo sapiens
ttccgacttcttggccagatgctgattcttcaggtcttgtagctgagccatggtctcatctatgatcttcatgtgtctttgttcc

SEQ ID NO: 194563 - DNA, 86 bp, Homo sapiens
ttggccagatgctgattcttcaggtcttgtagctgagccatggtctcatctatgatcttcatgtgtctttgttcctcctggtccca

SEQ ID NO: 194564 - DNA, 82 bp, Homo sapiens
attcttcaggtcttgtagctgagccatggtctcatctatgatcttcatgtgtctttgttcctcctggtcccagcagtgggaa

SEQ ID NO: 194565 - DNA, 83 bp, Homo sapiens
tcttgtagctgagccatggtctcatctatgatcttcatgtgtctttgttcctcctggtcccagcagtgggaacaggacaatag

SEQ ID NO: 194566 - DNA, 80 bp, Homo sapiens
agccatggtctcatctatgatcttcatgtgtctttgttcctcctggtcccagcagtgggaacaggacaataggtgaagac

SEQ ID NO: 194567 - DNA, 68 bp, Homo sapiens
tttcctcccagttattagtctgtcttttaattctttccttccttacctttttgagcttttctatctca

SEQ ID NO: 194568 - DNA, 69 bp, Homo sapiens
tcccagttattagtctgtcttttaattctttccttccttacctttttgagcttttctatctcattttca

SEQ ID NO: 194569 - DNA, 69 bp, Homo sapiens
tgtcttttaattctttccttccttacctttttgagcttttctatctcattttcatcttttttcactgtc

SEQ ID NO: 194570 - DNA, 71 bp, Homo sapiens
aattctttccttccttacctttttgagcttttctatctcattttcatcttttttcactgtctgctcccaca

SEQ ID NO: 194571 - DNA, 74 bp, Homo sapiens
tccttacctttttgagcttttctatctcattttcatcttttttcactgtctgctcccacatgtgtactttatct

SEQ ID NO: 194572 - DNA, 75 bp, Homo sapiens
ttttgagcttttctatctcattttcatcttttttcactgtctgctcccacatgtgtactttatcttggtcctcct

SEQ ID NO: 194573 - DNA, 75 bp, Homo sapiens
tttctatctcattttcatcttttttcactgtctgctcccacatgtgtactttatcttggtcctccttcagttggt

SEQ ID NO: 194574 - DNA, 73 bp, Homo sapiens
ttcatcttttttcactgtctgctcccacatgtgtactttatcttggtcctccttcagttggttcttttcaaaa

SEQ ID NO: 194575 - DNA, 72 bp, Homo sapiens
tttttcactgtctgctcccacatgtgtactttatcttggtcctccttcagttggttcttttcaaaatccaac

SEQ ID NO: 194576 - DNA, 75 bp, Homo sapiens
tgtctgctcccacatgtgtactttatcttggtcctccttcagttggttcttttcaaaatccaactgaatgcccaa

SEQ ID NO: 194577 - DNA, 72 bp, Homo sapiens
atgtgtactttatcttggtcctccttcagttggttcttttcaaaatccaactgaatgcccaagcgagtcttc

SEQ ID NO: 194578 - DNA, 74 bp, Homo sapiens
tttatcttggtcctccttcagttggttcttttcaaaatccaactgaatgcccaagcgagtcttctgattctcaa

SEQ ID NO: 194579 - DNA, 73 bp, Homo sapiens
gtcctccttcagttggttcttttcaaaatccaactgaatgcccaagcgagtcttctgattctcaaactccaaa

SEQ ID NO: 194580 - DNA, 73 bp, Homo sapiens
agttggttcttttcaaaatccaactgaatgcccaagcgagtcttctgattctcaaactccaaactgtgtataa

SEQ ID NO: 194581 - DNA, 72 bp, Homo sapiens
tttcaaaatccaactgaatgcccaagcgagtcttctgattctcaaactccaaactgtgtataaaggtggggg

SEQ ID NO: 194582 - DNA, 75 bp, Homo sapiens
actgaatgcccaagcgagtcttctgattctcaaactccaaactgtgtataaaggtggggggagaatcactcataa

SEQ ID NO: 194583 - DNA, 76 bp, Homo sapiens
tagaggctcaagggcatgccaatctcttctaccaatcctcccacctaccgcttcttggcgatttcattctgccgtt

SEQ ID NO: 194584 - DNA, 74 bp, Homo sapiens
ggcatgccaatctcttctaccaatcctcccacctaccgcttcttggcgatttcattctgccgtttcaccttttc

SEQ ID NO: 194585 - DNA, 70 bp, Homo sapiens
aatctcttctaccaatcctcccacctaccgcttcttggcgatttcattctgccgtttcaccttttcttcc

SEQ ID NO: 194586 - DNA, 69 bp, Homo sapiens
caatcctcccacctaccgcttcttggcgatttcattctgccgtttcaccttttcttcctcaaactcccg

SEQ ID NO: 194587 - DNA, 72 bp, Homo sapiens
acctaccgcttcttggcgatttcattctgccgtttcaccttttcttcctcaaactcccggatgttgcgcaca

SEQ ID NO: 194588 - DNA, 73 bp, Homo sapiens
cttcttggcgatttcattctgccgtttcaccttttcttcctcaaactcccggatgttgcgcacaccaatctcc

SEQ ID NO: 194589 - DNA, 71 bp, Homo sapiens
atttcattctgccgtttcaccttttcttcctcaaactcccggatgttgcgcacaccaatctcccgacaaaa

SEQ ID NO: 194590 - DNA, 69 bp, Homo sapiens
ccgtttcaccttttcttcctcaaactcccggatgttgcgcacaccaatctcccgacaaaactcttcaaa

SEQ ID NO: 194591 - DNA, 73 bp, Homo sapiens
ttttcttcctcaaactcccggatgttgcgcacaccaatctcccgacaaaactcttcaaacacctcatcctcta

SEQ ID NO: 194592 - DNA, 74 bp, Homo sapiens
aaactcccggatgttgcgcacaccaatctcccgacaaaactcttcaaacacctcatcctctacctgagaagaga

SEQ ID NO: 194593 - DNA, 75 bp, Homo sapiens
cccggatgttgcgcacaccaatctcccgacaaaactcttcaaacacctcatcctctacctgagaagagaagccag

SEQ ID NO: 194594 - DNA, 74 bp, Homo sapiens
acaccaatctcccgacaaaactcttcaaacacctcatcctctacctgagaagagaagccagggagggcatcggc

SEQ ID NO: 194595 - DNA, 76 bp, Homo sapiens
agtcctgccctgacacacacgctggcatggcccacaccctaccaacctggttcatcttctccttcaagtctttcat

SEQ ID NO: 194596 - DNA, 74 bp, Homo sapiens
ccctgacacacacgctggcatggcccacaccctaccaacctggttcatcttctccttcaagtctttcatttccc

SEQ ID NO: 194597 - DNA, 76 bp, Homo sapiens
gctggcatggcccacaccctaccaacctggttcatcttctccttcaagtctttcatttccctctctcggctctgaa

SEQ ID NO: 194598 - DNA, 75 bp, Homo sapiens
atggcccacaccctaccaacctggttcatcttctccttcaagtctttcatttccctctctcggctctgaatgatc

SEQ ID NO: 194599 - DNA, 78 bp, Homo sapiens
taccaacctggttcatcttctccttcaagtctttcatttccctctctcggctctgaatgatcctcttgatatcattaa

SEQ ID NO: 194600 - DNA, 80 bp, Homo sapiens
ttcatcttctccttcaagtctttcatttccctctctcggctctgaatgatcctcttgatatcattaatgcgaggcccaaa

SEQ ID NO: 194601 - DNA, 79 bp, Homo sapiens
tccttcaagtctttcatttccctctctcggctctgaatgatcctcttgatatcattaatgcgaggcccaaagttggcta

SEQ ID NO: 194602 - DNA, 81 bp, Homo sapiens
ctttcatttccctctctcggctctgaatgatcctcttgatatcattaatgcgaggcccaaagttggctagctcactctcca

SEQ ID NO: 194603 - DNA, 81 bp, Homo sapiens
ctctctcggctctgaatgatcctcttgatatcattaatgcgaggcccaaagttggctagctcactctccagcttggatttt

SEQ ID NO: 194604 - DNA, 80 bp, Homo sapiens
ctctgaatgatcctcttgatatcattaatgcgaggcccaaagttggctagctcactctccagcttggatttttcctacag

SEQ ID NO: 194605 - DNA, 80 bp, Homo sapiens
atgatcctcttgatatcattaatgcgaggcccaaagttggctagctcactctccagcttggatttttcctacaggcaatg

SEQ ID NO: 194606 - DNA, 77 bp, Homo sapiens
atatcattaatgcgaggcccaaagttggctagctcactctccagcttggatttttcctacaggcaatgggttgagag

SEQ ID NO: 194607 - DNA, 75 bp, Homo sapiens
aatgcgaggcccaaagttggctagctcactctccagcttggatttttcctacaggcaatgggttgagaggacaaa

SEQ ID NO: 194608 - DNA, 77 bp, Homo sapiens
agtaggtatcatcttaactcgcatttcacagataaagatgtgaaggttgacactgagaggtgaaaatacttgcctaa

SEQ ID NO: 194609 - DNA, 80 bp, Homo sapiens
aactcgcatttcacagataaagatgtgaaggttgacactgagaggtgaaaatacttgcctaatgtcatactcaaggcaga

SEQ ID NO: 194610 - DNA, 81 bp, Homo sapiens
acagataaagatgtgaaggttgacactgagaggtgaaaatacttgcctaatgtcatactcaaggcagagccaagctctgaa

SEQ ID NO: 194611 - DNA, 83 bp, Homo sapiens
tgaaaatacttgcctaatgtcatactcaaggcagagccaagctctgaacccctggctgtctgactctatgctatacctgactc

SEQ ID NO: 194612 - DNA, 83 bp, Homo sapiens
atacttgcctaatgtcatactcaaggcagagccaagctctgaacccctggctgtctgactctatgctatacctgactccctgc

SEQ ID NO: 194613 - DNA, 83 bp, Homo sapiens
aatgtcatactcaaggcagagccaagctctgaacccctggctgtctgactctatgctatacctgactccctgcggcaggctgg

SEQ ID NO: 194614 - DNA, 80 bp, Homo sapiens
aaggcagagccaagctctgaacccctggctgtctgactctatgctatacctgactccctgcggcaggctgggaggagacg

SEQ ID NO: 194615 - DNA, 78 bp, Homo sapiens
gctctgaacccctggctgtctgactctatgctatacctgactccctgcggcaggctgggaggagacggggaagtgaaa

SEQ ID NO: 194616 - DNA, 76 bp, Homo sapiens
cctggctgtctgactctatgctatacctgactccctgcggcaggctgggaggagacggggaagtgaaacaagttcc

SEQ ID NO: 194617 - DNA, 75 bp, Homo sapiens
tgtctgactctatgctatacctgactccctgcggcaggctgggaggagacggggaagtgaaacaagttccccacc

SEQ ID NO: 194618 - DNA, 72 bp, Homo sapiens
ctatgctatacctgactccctgcggcaggctgggaggagacggggaagtgaaacaagttccccacccccaga

SEQ ID NO: 194619 - DNA, 67 bp, Homo sapiens
actccctgcggcaggctgggaggagacggggaagtgaaacaagttccccacccccagagaaacctag

SEQ ID NO: 194620 - DNA, 68 bp, Homo sapiens
caggctgggaggagacggggaagtgaaacaagttccccacccccagagaaacctaggccaggaatgtg

SEQ ID NO: 194621 - DNA, 69 bp, Homo sapiens
aagtgaaacaagttccccacccccagagaaacctaggccaggaatgtgtggatggcctttggagaacag

SEQ ID NO: 194622 - DNA, 70 bp, Homo sapiens
aaacaagttccccacccccagagaaacctaggccaggaatgtgtggatggcctttggagaacagggctga

SEQ ID NO: 194623 - DNA, 71 bp, Homo sapiens
cccacccccagagaaacctaggccaggaatgtgtggatggcctttggagaacagggctgaaggccaggccc

SEQ ID NO: 194624 - DNA, 75 bp, Homo sapiens
agaaacctaggccaggaatgtgtggatggcctttggagaacagggctgaaggccaggccccacctgcagattcag

SEQ ID NO: 194625 - DNA, 78 bp, Homo sapiens
ggaatgtgtggatggcctttggagaacagggctgaaggccaggccccacctgcagattcagggctagatgtcgtgtct

SEQ ID NO: 194626 - DNA, 78 bp, Homo sapiens
tggatggcctttggagaacagggctgaaggccaggccccacctgcagattcagggctagatgtcgtgtcttggtctgt

SEQ ID NO: 194627 - DNA, 78 bp, Homo sapiens
tttggagaacagggctgaaggccaggccccacctgcagattcagggctagatgtcgtgtcttggtctgttctaggtca

SEQ ID NO: 194628 - DNA, 78 bp, Homo sapiens
gctgaaggccaggccccacctgcagattcagggctagatgtcgtgtcttggtctgttctaggtcactctgggagtact

SEQ ID NO: 194629 - DNA, 79 bp, Homo sapiens
aggccccacctgcagattcagggctagatgtcgtgtcttggtctgttctaggtcactctgggagtacttgagccgcatc

SEQ ID NO: 194630 - DNA, 83 bp, Homo sapiens
acctgcagattcagggctagatgtcgtgtcttggtctgttctaggtcactctgggagtacttgagccgcatctgcagtccatg

SEQ ID NO: 194631 - DNA, 84 bp, Homo sapiens
agatgtcgtgtcttggtctgttctaggtcactctgggagtacttgagccgcatctgcagtccatgggcctgagactgcacctga

SEQ ID NO: 194632 - DNA, 86 bp, Homo sapiens
ttggtctgttctaggtcactctgggagtacttgagccgcatctgcagtccatgggcctgagactgcacctgacgcagctctgcctc

SEQ ID NO: 194633 - DNA, 83 bp, Homo sapiens
taggtcactctgggagtacttgagccgcatctgcagtccatgggcctgagactgcacctgacgcagctctgcctctttccgtt

SEQ ID NO: 194634 - DNA, 84 bp, Homo sapiens
tctgggagtacttgagccgcatctgcagtccatgggcctgagactgcacctgacgcagctctgcctctttccgttttgccttca

SEQ ID NO: 194635 - DNA, 83 bp, Homo sapiens
atctgcagtccatgggcctgagactgcacctgacgcagctctgcctctttccgttttgccttcatctgctcctgaagggaaca

SEQ ID NO: 194636 - DNA, 79 bp, Homo sapiens
atgggcctgagactgcacctgacgcagctctgcctctttccgttttgccttcatctgctcctgaagggaacaagaaaga

SEQ ID NO: 194637 - DNA, 77 bp, Homo sapiens
agactgcacctgacgcagctctgcctctttccgttttgccttcatctgctcctgaagggaacaagaaagaagggcta

SEQ ID NO: 194638 - DNA, 73 bp, Homo sapiens
acgcagctctgcctctttccgttttgccttcatctgctcctgaagggaacaagaaagaagggctaggtggtaa

SEQ ID NO: 194639 - DNA, 78 bp, Homo sapiens
taggcttaggactcccactgctaaaaacagcactgcctgtggcttactttcagctcctctgtcaagcgctccttcttc

SEQ ID NO: 194640 - DNA, 79 bp, Homo sapiens
taggactcccactgctaaaaacagcactgcctgtggcttactttcagctcctctgtcaagcgctccttcttctctttca

SEQ ID NO: 194641 - DNA, 78 bp, Homo sapiens
taaaaacagcactgcctgtggcttactttcagctcctctgtcaagcgctccttcttctctttcaacttgtctactgct

SEQ ID NO: 194642 - DNA, 79 bp, Homo sapiens
actgcctgtggcttactttcagctcctctgtcaagcgctccttcttctctttcaacttgtctactgctttctcatccca

SEQ ID NO: 194643 - DNA, 79 bp, Homo sapiens
tgtggcttactttcagctcctctgtcaagcgctccttcttctctttcaacttgtctactgctttctcatcccagcgccg

SEQ ID NO: 194644 - DNA, 79 bp, Homo sapiens
agctcctctgtcaagcgctccttcttctctttcaacttgtctactgctttctcatcccagcgccgtgccttggccttca

SEQ ID NO: 194645 - DNA, 79 bp, Homo sapiens
ctctgtcaagcgctccttcttctctttcaacttgtctactgctttctcatcccagcgccgtgccttggccttcaggtca

SEQ ID NO: 194646 - DNA, 76 bp, Homo sapiens
cgctccttcttctctttcaacttgtctactgctttctcatcccagcgccgtgccttggccttcaggtcactggccc

SEQ ID NO: 194647 - DNA, 79 bp, Homo sapiens
tctttcaacttgtctactgctttctcatcccagcgccgtgccttggccttcaggtcactggccccaccagagatcactc

SEQ ID NO: 194648 - DNA, 80 bp, Homo sapiens
ttgtctactgctttctcatcccagcgccgtgccttggccttcaggtcactggccccaccagagatcactcctgacttctg

SEQ ID NO: 194649 - DNA, 77 bp, Homo sapiens
tttctcatcccagcgccgtgccttggccttcaggtcactggccccaccagagatcactcctgacttctggaataggg

SEQ ID NO: 194650 - DNA, 76 bp, Homo sapiens
agcgccgtgccttggccttcaggtcactggccccaccagagatcactcctgacttctggaatagggttccatccag

SEQ ID NO: 194651 - DNA, 79 bp, Homo sapiens
ttggccttcaggtcactggccccaccagagatcactcctgacttctggaatagggttccatccagtgccactgtctaca

SEQ ID NO: 194652 - DNA, 81 bp, Homo sapiens
ttcaggtcactggccccaccagagatcactcctgacttctggaatagggttccatccagtgccactgtctacacacagcag

SEQ ID NO: 194653 - DNA, 79 bp, Homo sapiens
ccaccagagatcactcctgacttctggaatagggttccatccagtgccactgtctacacacagcagggggaagagagaa

SEQ ID NO: 194654 - DNA, 78 bp, Homo sapiens
agagatcactcctgacttctggaatagggttccatccagtgccactgtctacacacagcagggggaagagagaagagg

SEQ ID NO: 194655 - DNA, 76 bp, Homo sapiens
tccagcctgggcaagggaatccacaccttgtggcgctggtggcctccaaaggcaatgcggcgggcatcttccacgt

SEQ ID NO: 194656 - DNA, 78 bp, Homo sapiens
gcaagggaatccacaccttgtggcgctggtggcctccaaaggcaatgcggcgggcatcttccacgttgtcacagacaa

SEQ ID NO: 194657 - DNA, 77 bp, Homo sapiens
aatccacaccttgtggcgctggtggcctccaaaggcaatgcggcgggcatcttccacgttgtcacagacaagggcat

SEQ ID NO: 194658 - DNA, 81 bp, Homo sapiens
cttgtggcgctggtggcctccaaaggcaatgcggcgggcatcttccacgttgtcacagacaagggcattgccacaagcata

SEQ ID NO: 194659 - DNA, 80 bp, Homo sapiens
tggcctccaaaggcaatgcggcgggcatcttccacgttgtcacagacaagggcattgccacaagcatactgcagggcctt

SEQ ID NO: 194660 - DNA, 79 bp, Homo sapiens
aaaggcaatgcggcgggcatcttccacgttgtcacagacaagggcattgccacaagcatactgcagggcctttttgata

SEQ ID NO: 194661 - DNA, 82 bp, Homo sapiens
ggcgggcatcttccacgttgtcacagacaagggcattgccacaagcatactgcagggcctttttgatatgaggtggctcata

SEQ ID NO: 194662 - DNA, 85 bp, Homo sapiens
tccacgttgtcacagacaagggcattgccacaagcatactgcagggcctttttgatatgaggtggctcatagcgaatcacatcaa

SEQ ID NO: 194663 - DNA, 85 bp, Homo sapiens
acagacaagggcattgccacaagcatactgcagggcctttttgatatgaggtggctcatagcgaatcacatcaatcactagcttg

SEQ ID NO: 194664 - DNA, 83 bp, Homo sapiens
aagggcattgccacaagcatactgcagggcctttttgatatgaggtggctcatagcgaatcacatcaatcactagcttggccc

SEQ ID NO: 194665 - DNA, 82 bp, Homo sapiens
acaagcatactgcagggcctttttgatatgaggtggctcatagcgaatcacatcaatcactagcttggcccccttcagctcc

SEQ ID NO: 194666 - DNA, 77 bp, Homo sapiens
cagggcctttttgatatgaggtggctcatagcgaatcacatcaatcactagcttggcccccttcagctcccggagtt

SEQ ID NO: 194667 - DNA, 80 bp, Homo sapiens
ctttttgatatgaggtggctcatagcgaatcacatcaatcactagcttggcccccttcagctcccggagtttctcatctg

SEQ ID NO: 194668 - DNA, 81 bp, Homo sapiens
atgaggtggctcatagcgaatcacatcaatcactagcttggcccccttcagctcccggagtttctcatctgtaggcttcac

SEQ ID NO: 194669 - DNA, 78 bp, Homo sapiens
atagcgaatcacatcaatcactagcttggcccccttcagctcccggagtttctcatctgtaggcttcacctgtgggga

SEQ ID NO: 194670 - DNA, 78 bp, Homo sapiens
atcaatcactagcttggcccccttcagctcccggagtttctcatctgtaggcttcacctgtggggagaagctcagtca

SEQ ID NO: 194671 - DNA, 77 bp, Homo sapiens
actagcttggcccccttcagctcccggagtttctcatctgtaggcttcacctgtggggagaagctcagtcagtggca

SEQ ID NO: 194672 - DNA, 71 bp, Homo sapiens
aggggcccttgaacactggcctgacccaatccccaacaagcctcacctccaggtagtcaagaggcaagaag

SEQ ID NO: 194673 - DNA, 73 bp, Homo sapiens
cccttgaacactggcctgacccaatccccaacaagcctcacctccaggtagtcaagaggcaagaaggtctcag

SEQ ID NO: 194674 - DNA, 75 bp, Homo sapiens
cctgacccaatccccaacaagcctcacctccaggtagtcaagaggcaagaaggtctcaggctccccacgctgctc

SEQ ID NO: 194675 - DNA, 76 bp, Homo sapiens
aatccccaacaagcctcacctccaggtagtcaagaggcaagaaggtctcaggctccccacgctgctccttgatata

SEQ ID NO: 194676 - DNA, 78 bp, Homo sapiens
aagcctcacctccaggtagtcaagaggcaagaaggtctcaggctccccacgctgctccttgatatactgaatacagtc

SEQ ID NO: 194677 - DNA, 76 bp, Homo sapiens
aggtagtcaagaggcaagaaggtctcaggctccccacgctgctccttgatatactgaatacagtcccggcctgtct

SEQ ID NO: 194678 - DNA, 76 bp, Homo sapiens
aagaggcaagaaggtctcaggctccccacgctgctccttgatatactgaatacagtcccggcctgtcttctccgag

SEQ ID NO: 194679 - DNA, 76 bp, Homo sapiens
aaggtctcaggctccccacgctgctccttgatatactgaatacagtcccggcctgtcttctccgagtccacaataa

SEQ ID NO: 194680 - DNA, 79 bp, Homo sapiens
tccccacgctgctccttgatatactgaatacagtcccggcctgtcttctccgagtccacaataatggcatccatgttct

SEQ ID NO: 194681 - DNA, 79 bp, Homo sapiens
tgctccttgatatactgaatacagtcccggcctgtcttctccgagtccacaataatggcatccatgttcttgcccaaaa

SEQ ID NO: 194682 - DNA, 76 bp, Homo sapiens
ttgatatactgaatacagtcccggcctgtcttctccgagtccacaataatggcatccatgttcttgcccaaaacct

SEQ ID NO: 194683 - DNA, 73 bp, Homo sapiens
aatacagtcccggcctgtcttctccgagtccacaataatggcatccatgttcttgcccaaaaccttggttaca

SEQ ID NO: 194684 - DNA, 76 bp, Homo sapiens
ctgtcttctccgagtccacaataatggcatccatgttcttgcccaaaaccttggttacagcaatctgatacttctt

SEQ ID NO: 194685 - DNA, 76 bp, Homo sapiens
ttctccgagtccacaataatggcatccatgttcttgcccaaaaccttggttacagcaatctgatacttcttttgtg

SEQ ID NO: 194686 - DNA, 77 bp, Homo sapiens
acaataatggcatccatgttcttgcccaaaaccttggttacagcaatctgatacttcttttgtgtgggctggcatag

SEQ ID NO: 194687 - DNA, 77 bp, Homo sapiens
atccatgttcttgcccaaaaccttggttacagcaatctgatacttcttttgtgtgggctggcataggtcaatgaggc

SEQ ID NO: 194688 - DNA, 76 bp, Homo sapiens
tcttgcccaaaaccttggttacagcaatctgatacttcttttgtgtgggctggcataggtcaatgaggcggccgta

SEQ ID NO: 194689 - DNA, 75 bp, Homo sapiens
aaccttggttacagcaatctgatacttcttttgtgtgggctggcataggtcaatgaggcggccgtactgagtaaa

SEQ ID NO: 194690 - DNA, 72 bp, Homo sapiens
atacttcttttgtgtgggctggcataggtcaatgaggcggccgtactgagtaaagtaggaagggaaaactga

SEQ ID NO: 194691 - DNA, 78 bp, Homo sapiens
acagtgagtgtaagtgctcaggaaatgagttccctctctgctcttaccacagagccagggtaaaggcgcttgatgctt

SEQ ID NO: 194692 - DNA, 79 bp, Homo sapiens
taagtgctcaggaaatgagttccctctctgctcttaccacagagccagggtaaaggcgcttgatgctttccattatctc

SEQ ID NO: 194693 - DNA, 76 bp, Homo sapiens
aggaaatgagttccctctctgctcttaccacagagccagggtaaaggcgcttgatgctttccattatctctgcctt

SEQ ID NO: 194694 - DNA, 79 bp, Homo sapiens
agttccctctctgctcttaccacagagccagggtaaaggcgcttgatgctttccattatctctgcctttcgctgctggc

SEQ ID NO: 194695 - DNA, 83 bp, Homo sapiens
tctgctcttaccacagagccagggtaaaggcgcttgatgctttccattatctctgcctttcgctgctggcggctgctctcctg

SEQ ID NO: 194696 - DNA, 82 bp, Homo sapiens
acagagccagggtaaaggcgcttgatgctttccattatctctgcctttcgctgctggcggctgctctcctggcggtcgatgc

SEQ ID NO: 194697 - DNA, 81 bp, Homo sapiens
agggtaaaggcgcttgatgctttccattatctctgcctttcgctgctggcggctgctctcctggcggtcgatgcgggcatc

SEQ ID NO: 194698 - DNA, 86 bp, Homo sapiens
ttgatgctttccattatctctgcctttcgctgctggcggctgctctcctggcggtcgatgcgggcatcccctagctgctccatcac

SEQ ID NO: 194699 - DNA, 84 bp, Homo sapiens
attatctctgcctttcgctgctggcggctgctctcctggcggtcgatgcgggcatcccctagctgctccatcacctggttcagc

SEQ ID NO: 194700 - DNA, 81 bp, Homo sapiens
cctttcgctgctggcggctgctctcctggcggtcgatgcgggcatcccctagctgctccatcacctggttcagctccttat

SEQ ID NO: 194701 - DNA, 83 bp, Homo sapiens
ctggcggctgctctcctggcggtcgatgcgggcatcccctagctgctccatcacctggttcagctccttattgatttcatcaa

SEQ ID NO: 194702 - DNA, 82 bp, Homo sapiens
ctgctctcctggcggtcgatgcgggcatcccctagctgctccatcacctggttcagctccttattgatttcatcaatacgcc

SEQ ID NO: 194703 - DNA, 82 bp, Homo sapiens
ggtcgatgcgggcatcccctagctgctccatcacctggttcagctccttattgatttcatcaatacgccgcttggccatctc

SEQ ID NO: 194704 - DNA, 81 bp, Homo sapiens
atgcgggcatcccctagctgctccatcacctggttcagctccttattgatttcatcaatacgccgcttggccatctccacc

SEQ ID NO: 194705 - DNA, 83 bp, Homo sapiens
cctagctgctccatcacctggttcagctccttattgatttcatcaatacgccgcttggccatctccacctcctctgtcagctc

SEQ ID NO: 194706 - DNA, 79 bp, Homo sapiens
atcacctggttcagctccttattgatttcatcaatacgccgcttggccatctccacctcctctgtcagctccccctcta

SEQ ID NO: 194707 - DNA, 79 bp, Homo sapiens
tggttcagctccttattgatttcatcaatacgccgcttggccatctccacctcctctgtcagctccccctctagcttct

SEQ ID NO: 194708 - DNA, 80 bp, Homo sapiens
ttattgatttcatcaatacgccgcttggccatctccacctcctctgtcagctccccctctagcttcttctgctcttctag

SEQ ID NO: 194709 - DNA, 79 bp, Homo sapiens
atcaatacgccgcttggccatctccacctcctctgtcagctccccctctagcttcttctgctcttctagggactgccta

SEQ ID NO: 194710 - DNA, 77 bp, Homo sapiens
cttggccatctccacctcctctgtcagctccccctctagcttcttctgctcttctagggactgcctacaaagtgagg

SEQ ID NO: 194711 - DNA, 78 bp, Homo sapiens
atctccacctcctctgtcagctccccctctagcttcttctgctcttctagggactgcctacaaagtgagggcacacag

SEQ ID NO: 194712 - DNA, 78 bp, Homo sapiens
tcctctgtcagctccccctctagcttcttctgctcttctagggactgcctacaaagtgagggcacacaggagttactc

SEQ ID NO: 194713 - DNA, 78 bp, Homo sapiens
tgtaggtagggtcacaagaacaggcctggaagtaagggggacagatgcagagctacatacttgctagtggtgatgtat

SEQ ID NO: 194714 - DNA, 77 bp, Homo sapiens
acaagaacaggcctggaagtaagggggacagatgcagagctacatacttgctagtggtgatgtattcctccagtttc

SEQ ID NO: 194715 - DNA, 80 bp, Homo sapiens
ctggaagtaagggggacagatgcagagctacatacttgctagtggtgatgtattcctccagtttctcaatccgcttctga

SEQ ID NO: 194716 - DNA, 80 bp, Homo sapiens
gtaagggggacagatgcagagctacatacttgctagtggtgatgtattcctccagtttctcaatccgcttctgattctct

SEQ ID NO: 194717 - DNA, 81 bp, Homo sapiens
acagatgcagagctacatacttgctagtggtgatgtattcctccagtttctcaatccgcttctgattctcttcaatttccc

SEQ ID NO: 194718 - DNA, 77 bp, Homo sapiens
ctacatacttgctagtggtgatgtattcctccagtttctcaatccgcttctgattctcttcaatttcccgcagcttt

SEQ ID NO: 194719 - DNA, 79 bp, Homo sapiens
ttgctagtggtgatgtattcctccagtttctcaatccgcttctgattctcttcaatttcccgcagcttttgcttgatct

SEQ ID NO: 194720 - DNA, 76 bp, Homo sapiens
tattcctccagtttctcaatccgcttctgattctcttcaatttcccgcagcttttgcttgatcttggcctgggaaa

SEQ ID NO: 194721 - DNA, 74 bp, Homo sapiens
agtttctcaatccgcttctgattctcttcaatttcccgcagcttttgcttgatcttggcctgggaaacaaacat

SEQ ID NO: 194722 - DNA, 77 bp, Homo sapiens
aatccgcttctgattctcttcaatttcccgcagcttttgcttgatcttggcctgggaaacaaacattccatcatcag

SEQ ID NO: 194723 - DNA, 77 bp, Homo sapiens
ttctcttcaatttcccgcagcttttgcttgatcttggcctgggaaacaaacattccatcatcaggggctgcacgagt

SEQ ID NO: 194724 - DNA, 76 bp, Homo sapiens
ttcaatttcccgcagcttttgcttgatcttggcctgggaaacaaacattccatcatcaggggctgcacgagtttac

SEQ ID NO: 194725 - DNA, 73 bp, Homo sapiens
atatatccttttctgtggaccatcatccctaatcttataactatagcccacctctgtctctactttcttccgt

SEQ ID NO: 194726 - DNA, 76 bp, Homo sapiens
ttctgtggaccatcatccctaatcttataactatagcccacctctgtctctactttcttccgttcttccagatcca

SEQ ID NO: 194727 - DNA, 73 bp, Homo sapiens
atcatccctaatcttataactatagcccacctctgtctctactttcttccgttcttccagatccagacggtcc

SEQ ID NO: 194728 - DNA, 73 bp, Homo sapiens
atcttataactatagcccacctctgtctctactttcttccgttcttccagatccagacggtcctggtcagctt

SEQ ID NO: 194729 - DNA, 75 bp, Homo sapiens
tatagcccacctctgtctctactttcttccgttcttccagatccagacggtcctggtcagctttctggtctcgat

SEQ ID NO: 194730 - DNA, 76 bp, Homo sapiens
tctgtctctactttcttccgttcttccagatccagacggtcctggtcagctttctggtctcgattgaatttctcca

SEQ ID NO: 194731 - DNA, 75 bp, Homo sapiens
tactttcttccgttcttccagatccagacggtcctggtcagctttctggtctcgattgaatttctccagctcctg

SEQ ID NO: 194732 - DNA, 75 bp, Homo sapiens
cgttcttccagatccagacggtcctggtcagctttctggtctcgattgaatttctccagctcctgggccagggta

SEQ ID NO: 194733 - DNA, 79 bp, Homo sapiens
atccagacggtcctggtcagctttctggtctcgattgaatttctccagctcctgggccagggtagctgctctcttgctg

SEQ ID NO: 194734 - DNA, 80 bp, Homo sapiens
tggtcagctttctggtctcgattgaatttctccagctcctgggccagggtagctgctctcttgctggcttcttctttcaa

SEQ ID NO: 194735 - DNA, 76 bp, Homo sapiens
ctttctggtctcgattgaatttctccagctcctgggccagggtagctgctctcttgctggcttcttctttcaaccg

SEQ ID NO: 194736 - DNA, 74 bp, Homo sapiens
attgaatttctccagctcctgggccagggtagctgctctcttgctggcttcttctttcaaccggtggtatttct

SEQ ID NO: 194737 - DNA, 76 bp, Homo sapiens
tccagctcctgggccagggtagctgctctcttgctggcttcttctttcaaccggtggtatttcttcacctgtgtta

SEQ ID NO: 194738 - DNA, 74 bp, Homo sapiens
ctgggccagggtagctgctctcttgctggcttcttctttcaaccggtggtatttcttcacctgtgttagggaca

SEQ ID NO: 194739 - DNA, 74 bp, Homo sapiens
tagctgctctcttgctggcttcttctttcaaccggtggtatttcttcacctgtgttagggacagggaaggagaa

SEQ ID NO: 194740 - DNA, 72 bp, Homo sapiens
ttgctggcttcttctttcaaccggtggtatttcttcacctgtgttagggacagggaaggagaacagggatga

SEQ ID NO: 194741 - DNA, 75 bp, Homo sapiens
agatgtcagcccagggatctcctccctgccaaccccttccagagcttacctgattctcctccaacgtcaaatctc

SEQ ID NO: 194742 - DNA, 74 bp, Homo sapiens
agggatctcctccctgccaaccccttccagagcttacctgattctcctccaacgtcaaatctctgccctgactc

SEQ ID NO: 194743 - DNA, 76 bp, Homo sapiens
cccttccagagcttacctgattctcctccaacgtcaaatctctgccctgactctgactctcttcttccatccgttc

SEQ ID NO: 194744 - DNA, 76 bp, Homo sapiens
agcttacctgattctcctccaacgtcaaatctctgccctgactctgactctcttcttccatccgttcttcaaactc

SEQ ID NO: 194745 - DNA, 77 bp, Homo sapiens
cctgattctcctccaacgtcaaatctctgccctgactctgactctcttcttccatccgttcttcaaactcctgccga

SEQ ID NO: 194746 - DNA, 77 bp, Homo sapiens
aacgtcaaatctctgccctgactctgactctcttcttccatccgttcttcaaactcctgccgagccttctccactga

SEQ ID NO: 194747 - DNA, 81 bp, Homo sapiens
actctgactctcttcttccatccgttcttcaaactcctgccgagccttctccactgacagcatctccttctccagctcatc

SEQ ID NO: 194748 - DNA, 81 bp, Homo sapiens
tcttcttccatccgttcttcaaactcctgccgagccttctccactgacagcatctccttctccagctcatccatgtcacct

SEQ ID NO: 194749 - DNA, 79 bp, Homo sapiens
atccgttcttcaaactcctgccgagccttctccactgacagcatctccttctccagctcatccatgtcacctttacgct

SEQ ID NO: 194750 - DNA, 80 bp, Homo sapiens
aaactcctgccgagccttctccactgacagcatctccttctccagctcatccatgtcacctttacgcttcttgtagtgct

SEQ ID NO: 194751 - DNA, 88 bp, Homo sapiens
gagccttctccactgacagcatctccttctccagctcatccatgtcacctttacgcttcttgtagtgcttctgagcattctgcagaga

SEQ ID NO: 194752 - DNA, 87 bp, Homo sapiens
tccactgacagcatctccttctccagctcatccatgtcacctttacgcttcttgtagtgcttctgagcattctgcagagacttcttg

SEQ ID NO: 194753 - DNA, 85 bp, Homo sapiens
atctccttctccagctcatccatgtcacctttacgcttcttgtagtgcttctgagcattctgcagagacttcttggctgcttcca

SEQ ID NO: 194754 - DNA, 85 bp, Homo sapiens
ccagctcatccatgtcacctttacgcttcttgtagtgcttctgagcattctgcagagacttcttggctgcttccagcttcttgat

SEQ ID NO: 194755 - DNA, 82 bp, Homo sapiens
atccatgtcacctttacgcttcttgtagtgcttctgagcattctgcagagacttcttggctgcttccagcttcttgattttg

SEQ ID NO: 194756 - DNA, 80 bp, Homo sapiens
tttacgcttcttgtagtgcttctgagcattctgcagagacttcttggctgcttccagcttcttgattttgtgggaggtgt

SEQ ID NO: 194757 - DNA, 81 bp, Homo sapiens
ttcttgtagtgcttctgagcattctgcagagacttcttggctgcttccagcttcttgattttgtgggaggtgttctccttg

SEQ ID NO: 194758 - DNA, 81 bp, Homo sapiens
ttctgagcattctgcagagacttcttggctgcttccagcttcttgattttgtgggaggtgttctccttggctttgatgtac

SEQ ID NO: 194759 - DNA, 79 bp, Homo sapiens
attctgcagagacttcttggctgcttccagcttcttgattttgtgggaggtgttctccttggctttgatgtactgaggc

SEQ ID NO: 194760 - DNA, 76 bp, Homo sapiens
ttcttggctgcttccagcttcttgattttgtgggaggtgttctccttggctttgatgtactgaggccgcttctggt

SEQ ID NO: 194761 - DNA, 76 bp, Homo sapiens
ttccagcttcttgattttgtgggaggtgttctccttggctttgatgtactgaggccgcttctggttcaattctgag

SEQ ID NO: 194762 - DNA, 75 bp, Homo sapiens
ttcttgattttgtgggaggtgttctccttggctttgatgtactgaggccgcttctggttcaattctgagtccttc

SEQ ID NO: 194763 - DNA, 73 bp, Homo sapiens
ttgtgggaggtgttctccttggctttgatgtactgaggccgcttctggttcaattctgagtccttctcccttt

SEQ ID NO: 194764 - DNA, 74 bp, Homo sapiens
gtgttctccttggctttgatgtactgaggccgcttctggttcaattctgagtccttctcccttttgccagaggg

SEQ ID NO: 194765 - DNA, 71 bp, Homo sapiens
ctttgatgtactgaggccgcttctggttcaattctgagtccttctcccttttgccagaggggtgggggaaa

SEQ ID NO: 194766 - DNA, 72 bp, Homo sapiens
tactgaggccgcttctggttcaattctgagtccttctcccttttgccagaggggtgggggaaaccagtgaga

SEQ ID NO: 194767 - DNA, 80 bp, Homo sapiens
agcacggcctcttggtttcccacaagttgcaggcccaggtctgcctcttacttgatctccttctcaatctgctgctgctc

SEQ ID NO: 194768 - DNA, 80 bp, Homo sapiens
ttggtttcccacaagttgcaggcccaggtctgcctcttacttgatctccttctcaatctgctgctgctcccgcatcattt

SEQ ID NO: 194769 - DNA, 82 bp, Homo sapiens
acaagttgcaggcccaggtctgcctcttacttgatctccttctcaatctgctgctgctcccgcatcattttgcccagctcct

SEQ ID NO: 194770 - DNA, 81 bp, Homo sapiens
aggcccaggtctgcctcttacttgatctccttctcaatctgctgctgctcccgcatcattttgcccagctccttcttcttc

SEQ ID NO: 194771 - DNA, 83 bp, Homo sapiens
tcttacttgatctccttctcaatctgctgctgctcccgcatcattttgcccagctccttcttcttctccttcagttcatcctc

SEQ ID NO: 194772 - DNA, 82 bp, Homo sapiens
ttgatctccttctcaatctgctgctgctcccgcatcattttgcccagctccttcttcttctccttcagttcatcctccacct

SEQ ID NO: 194773 - DNA, 82 bp, Homo sapiens
ttctcaatctgctgctgctcccgcatcattttgcccagctccttcttcttctccttcagttcatcctccaccttgtccatac

SEQ ID NO: 194774 - DNA, 78 bp, Homo sapiens
tgctcccgcatcattttgcccagctccttcttcttctccttcagttcatcctccaccttgtccatacgcttcttgtcc

SEQ ID NO: 194775 - DNA, 76 bp, Homo sapiens
atcattttgcccagctccttcttcttctccttcagttcatcctccaccttgtccatacgcttcttgtccttctcga

SEQ ID NO: 194776 - DNA, 76 bp, Homo sapiens
cagctccttcttcttctccttcagttcatcctccaccttgtccatacgcttcttgtccttctcgatctccttgttc

SEQ ID NO: 194777 - DNA, 76 bp, Homo sapiens
ttcttctccttcagttcatcctccaccttgtccatacgcttcttgtccttctcgatctccttgttctttgaggcca

SEQ ID NO: 194778 - DNA, 75 bp, Homo sapiens
tcagttcatcctccaccttgtccatacgcttcttgtccttctcgatctccttgttctttgaggccagttccttgt

SEQ ID NO: 194779 - DNA, 74 bp, Homo sapiens
atcctccaccttgtccatacgcttcttgtccttctcgatctccttgttctttgaggccagttccttgttgagct

SEQ ID NO: 194780 - DNA, 74 bp, Homo sapiens
ccttgtccatacgcttcttgtccttctcgatctccttgttctttgaggccagttccttgttgagcttctcaatt

SEQ ID NO: 194781 - DNA, 76 bp, Homo sapiens
tcttgtccttctcgatctccttgttctttgaggccagttccttgttgagcttctcaatttccacttcattatggta

SEQ ID NO: 194782 - DNA, 75 bp, Homo sapiens
ttctcgatctccttgttctttgaggccagttccttgttgagcttctcaatttccacttcattatggtaaagctta

SEQ ID NO: 194783 - DNA, 73 bp, Homo sapiens
ctccttgttctttgaggccagttccttgttgagcttctcaatttccacttcattatggtaaagcttaaagagc

SEQ ID NO: 194784 - DNA, 78 bp, Homo sapiens
tttgaggccagttccttgttgagcttctcaatttccacttcattatggtaaagcttaaagagctgcagctgtacctga

SEQ ID NO: 194785 - DNA, 77 bp, Homo sapiens
ttccttgttgagcttctcaatttccacttcattatggtaaagcttaaagagctgcagctgtacctgagcccgtacta

SEQ ID NO: 194786 - DNA, 77 bp, Homo sapiens
ttctcaatttccacttcattatggtaaagcttaaagagctgcagctgtacctgagcccgtactacctcatccttcag

SEQ ID NO: 194787 - DNA, 76 bp, Homo sapiens
aatttccacttcattatggtaaagcttaaagagctgcagctgtacctgagcccgtactacctcatccttcaggcgc

SEQ ID NO: 194788 - DNA, 76 bp, Homo sapiens
attatggtaaagcttaaagagctgcagctgtacctgagcccgtactacctcatccttcaggcgctggtaccggtca

SEQ ID NO: 194789 - DNA, 78 bp, Homo sapiens
aagcttaaagagctgcagctgtacctgagcccgtactacctcatccttcaggcgctggtaccggtcagcctgtgcaaa

SEQ ID NO: 194790 - DNA, 78 bp, Homo sapiens
tgcagctgtacctgagcccgtactacctcatccttcaggcgctggtaccggtcagcctgtgcaaacaggggaatggtg

SEQ ID NO: 194791 - DNA, 76 bp, Homo sapiens
tgtacctgagcccgtactacctcatccttcaggcgctggtaccggtcagcctgtgcaaacaggggaatggtggcag

SEQ ID NO: 194792 - DNA, 75 bp, Homo sapiens
actggctccatcctggtccctcagagccaagaggtagcttggccacctacctcttctttctcctgctttgcttcc

SEQ ID NO: 194793 - DNA, 75 bp, Homo sapiens
atcctggtccctcagagccaagaggtagcttggccacctacctcttctttctcctgctttgcttccttgcgttca

SEQ ID NO: 194794 - DNA, 73 bp, Homo sapiens
agccaagaggtagcttggccacctacctcttctttctcctgctttgcttccttgcgttcagccgcaatatttt

SEQ ID NO: 194795 - DNA, 72 bp, Homo sapiens
acctacctcttctttctcctgctttgcttccttgcgttcagccgcaatatttttcttgcgatggtaattaaa

SEQ ID NO: 194796 - DNA, 75 bp, Homo sapiens
tctttctcctgctttgcttccttgcgttcagccgcaatatttttcttgcgatggtaattaaactgtgtgtcctct

SEQ ID NO: 194797 - DNA, 76 bp, Homo sapiens
gctttgcttccttgcgttcagccgcaatatttttcttgcgatggtaattaaactgtgtgtcctcttcagccttcac

SEQ ID NO: 194798 - DNA, 75 bp, Homo sapiens
ttccttgcgttcagccgcaatatttttcttgcgatggtaattaaactgtgtgtcctcttcagccttcaccatttc

SEQ ID NO: 194799 - DNA, 73 bp, Homo sapiens
gttcagccgcaatatttttcttgcgatggtaattaaactgtgtgtcctcttcagccttcaccatttccttctt

SEQ ID NO: 194800 - DNA, 74 bp, Homo sapiens
atatttttcttgcgatggtaattaaactgtgtgtcctcttcagccttcaccatttccttctttcgcttgtcata

SEQ ID NO: 194801 - DNA, 76 bp, Homo sapiens
atggtaattaaactgtgtgtcctcttcagccttcaccatttccttctttcgcttgtcatactcctgcgccagctcc

SEQ ID NO: 194802 - DNA, 76 bp, Homo sapiens
aattaaactgtgtgtcctcttcagccttcaccatttccttctttcgcttgtcatactcctgcgccagctccccaga

SEQ ID NO: 194803 - DNA, 78 bp, Homo sapiens
tcctcttcagccttcaccatttccttctttcgcttgtcatactcctgcgccagctccccagaacgactaatctcttca

SEQ ID NO: 194804 - DNA, 76 bp, Homo sapiens
agccttcaccatttccttctttcgcttgtcatactcctgcgccagctccccagaacgactaatctcttcaaataga

SEQ ID NO: 194805 - DNA, 77 bp, Homo sapiens
atttccttctttcgcttgtcatactcctgcgccagctccccagaacgactaatctcttcaaatagagctgtcctctc

SEQ ID NO: 194806 - DNA, 76 bp, Homo sapiens
tttcgcttgtcatactcctgcgccagctccccagaacgactaatctcttcaaatagagctgtcctctctttggggt

SEQ ID NO: 194807 - DNA, 78 bp, Homo sapiens
tactcctgcgccagctccccagaacgactaatctcttcaaatagagctgtcctctctttggggttcttcatggcaata

SEQ ID NO: 194808 - DNA, 78 bp, Homo sapiens
agctccccagaacgactaatctcttcaaatagagctgtcctctctttggggttcttcatggcaatagattccacagca

SEQ ID NO: 194809 - DNA, 76 bp, Homo sapiens
aacgactaatctcttcaaatagagctgtcctctctttggggttcttcatggcaatagattccacagcaccctagta

SEQ ID NO: 194810 - DNA, 75 bp, Homo sapiens
aatctcttcaaatagagctgtcctctctttggggttcttcatggcaatagattccacagcaccctagtaaaggtc

SEQ ID NO: 194811 - DNA, 73 bp, Homo sapiens
aaatagagctgtcctctctttggggttcttcatggcaatagattccacagcaccctagtaaaggtcgaaacac

SEQ ID NO: 194812 - DNA, 74 bp, Homo sapiens
tcctctctttggggttcttcatggcaatagattccacagcaccctagtaaaggtcgaaacactcttccacttca

SEQ ID NO: 194813 - DNA, 68 bp, Homo sapiens
acatggtctggcaaaaaccagatagccaataactgttaaaaacgcccacctggaaaacgaggaagtta

SEQ ID NO: 194814 - DNA, 66 bp, Homo sapiens
aaaaaccagatagccaataactgttaaaaacgcccacctggaaaacgaggaagttacgagctttga

SEQ ID NO: 194815 - DNA, 70 bp, Homo sapiens
atagccaataactgttaaaaacgcccacctggaaaacgaggaagttacgagctttgatgagaatgcccaa

SEQ ID NO: 194816 - DNA, 70 bp, Homo sapiens
taactgttaaaaacgcccacctggaaaacgaggaagttacgagctttgatgagaatgcccaacttctcta

SEQ ID NO: 194817 - DNA, 70 bp, Homo sapiens
aaaacgcccacctggaaaacgaggaagttacgagctttgatgagaatgcccaacttctctaattcctcac

SEQ ID NO: 194818 - DNA, 74 bp, Homo sapiens
aaaacgaggaagttacgagctttgatgagaatgcccaacttctctaattcctcactgtactcatgtagttggac

SEQ ID NO: 194819 - DNA, 75 bp, Homo sapiens
aagttacgagctttgatgagaatgcccaacttctctaattcctcactgtactcatgtagttggaccactttgttg

SEQ ID NO: 194820 - DNA, 79 bp, Homo sapiens
tttgatgagaatgcccaacttctctaattcctcactgtactcatgtagttggaccactttgttgttgatcttgtactca

SEQ ID NO: 194821 - DNA, 76 bp, Homo sapiens
aatgcccaacttctctaattcctcactgtactcatgtagttggaccactttgttgttgatcttgtactcagaagaa

SEQ ID NO: 194822 - DNA, 76 bp, Homo sapiens
ttctctaattcctcactgtactcatgtagttggaccactttgttgttgatcttgtactcagaagaacctcctacaa

SEQ ID NO: 194823 - DNA, 75 bp, Homo sapiens
aattcctcactgtactcatgtagttggaccactttgttgttgatcttgtactcagaagaacctcctacaagacaa

SEQ ID NO: 194824 - DNA, 80 bp, Homo sapiens
tgtactcatgtagttggaccactttgttgttgatcttgtactcagaagaacctcctacaagacaatgcatgagttggcaa

SEQ ID NO: 194825 - DNA, 77 bp, Homo sapiens
tagttggaccactttgttgttgatcttgtactcagaagaacctcctacaagacaatgcatgagttggcaagggtcag

SEQ ID NO: 194826 - DNA, 74 bp, Homo sapiens
tctagccacctcccaggacccaaggagagctttctggccagcctcacccacctacaatgacacgggcaaaggta

SEQ ID NO: 194827 - DNA, 73 bp, Homo sapiens
aggacccaaggagagctttctggccagcctcacccacctacaatgacacgggcaaaggtacggtcctcagcac

SEQ ID NO: 194828 - DNA, 75 bp, Homo sapiens
agagctttctggccagcctcacccacctacaatgacacgggcaaaggtacggtcctcagcaccctcctcagagta

SEQ ID NO: 194829 - DNA, 75 bp, Homo sapiens
tttctggccagcctcacccacctacaatgacacgggcaaaggtacggtcctcagcaccctcctcagagtagacca

SEQ ID NO: 194830 - DNA, 75 bp, Homo sapiens
cctcacccacctacaatgacacgggcaaaggtacggtcctcagcaccctcctcagagtagaccatgctgacaaag

SEQ ID NO: 194831 - DNA, 74 bp, Homo sapiens
ctacaatgacacgggcaaaggtacggtcctcagcaccctcctcagagtagaccatgctgacaaaggcccggttg

SEQ ID NO: 194832 - DNA, 74 bp, Homo sapiens
acgggcaaaggtacggtcctcagcaccctcctcagagtagaccatgctgacaaaggcccggttggcagctggct

SEQ ID NO: 194833 - DNA, 80 bp, Homo sapiens
tacggtcctcagcaccctcctcagagtagaccatgctgacaaaggcccggttggcagctggcttgcccacaggagctcca

SEQ ID NO: 194834 - DNA, 79 bp, Homo sapiens
accctcctcagagtagaccatgctgacaaaggcccggttggcagctggcttgcccacaggagctccatggatcaggtcc

SEQ ID NO: 194835 - DNA, 79 bp, Homo sapiens
agagtagaccatgctgacaaaggcccggttggcagctggcttgcccacaggagctccatggatcaggtcccgcagggtc

SEQ ID NO: 194836 - DNA, 77 bp, Homo sapiens
accatgctgacaaaggcccggttggcagctggcttgcccacaggagctccatggatcaggtcccgcagggtctttac

SEQ ID NO: 194837 - DNA, 74 bp, Homo sapiens
acaaaggcccggttggcagctggcttgcccacaggagctccatggatcaggtcccgcagggtctttacccgcag

SEQ ID NO: 194838 - DNA, 75 bp, Homo sapiens
ttggcagctggcttgcccacaggagctccatggatcaggtcccgcagggtctttacccgcaggttgctggttttt

SEQ ID NO: 194839 - DNA, 74 bp, Homo sapiens
tggcttgcccacaggagctccatggatcaggtcccgcagggtctttacccgcaggttgctggttttttcaccta

SEQ ID NO: 194840 - DNA, 73 bp, Homo sapiens
acaggagctccatggatcaggtcccgcagggtctttacccgcaggttgctggttttttcacctagcacaaagc

SEQ ID NO: 194841 - DNA, 76 bp, Homo sapiens
atcaggtcccgcagggtctttacccgcaggttgctggttttttcacctagcacaaagctgatggcatccatgagat

SEQ ID NO: 194842 - DNA, 76 bp, Homo sapiens
ccgcagggtctttacccgcaggttgctggttttttcacctagcacaaagctgatggcatccatgagatttgactta

SEQ ID NO: 194843 - DNA, 74 bp, Homo sapiens
aggttgctggttttttcacctagcacaaagctgatggcatccatgagatttgacttacctaagggaagagggac

SEQ ID NO: 194844 - DNA, 76 bp, Homo sapiens
tttttcacctagcacaaagctgatggcatccatgagatttgacttacctaagggaagagggacgaggcagtagagg

SEQ ID NO: 194845 - DNA, 77 bp, Homo sapiens
ctagcacaaagctgatggcatccatgagatttgacttacctaagggaagagggacgaggcagtagagggaaagtcag

SEQ ID NO: 194846 - DNA, 68 bp, Homo sapiens
cggcttttgacggtttcggtggtaggaaaagggcgagttcgaggcaactacctctgacatagcggtgg

SEQ ID NO: 194847 - DNA, 66 bp, Homo sapiens
cggtttcggtggtaggaaaagggcgagttcgaggcaactacctctgacatagcggtggggggtggg

SEQ ID NO: 194848 - DNA, 73 bp, Homo sapiens
gaaaagggcgagttcgaggcaactacctctgacatagcggtggggggtggggatcgacacctcaagcattcta

SEQ ID NO: 194849 - DNA, 74 bp, Homo sapiens
cgagttcgaggcaactacctctgacatagcggtggggggtggggatcgacacctcaagcattctaaagactgga

SEQ ID NO: 194850 - DNA, 75 bp, Homo sapiens
aactacctctgacatagcggtggggggtggggatcgacacctcaagcattctaaagactggagcgctgggtctga

SEQ ID NO: 194851 - DNA, 75 bp, Homo sapiens
tgacatagcggtggggggtggggatcgacacctcaagcattctaaagactggagcgctgggtctgaaattcaaaa

SEQ ID NO: 194852 - DNA, 74 bp, Homo sapiens
tggggggtggggatcgacacctcaagcattctaaagactggagcgctgggtctgaaattcaaaagtgccgcctc

SEQ ID NO: 194853 - DNA, 78 bp, Homo sapiens
ggatcgacacctcaagcattctaaagactggagcgctgggtctgaaattcaaaagtgccgcctccagagaagagtaga

SEQ ID NO: 194854 - DNA, 75 bp, Homo sapiens
acacctcaagcattctaaagactggagcgctgggtctgaaattcaaaagtgccgcctccagagaagagtagaaag

SEQ ID NO: 194855 - DNA, 73 bp, Homo sapiens
attctaaagactggagcgctgggtctgaaattcaaaagtgccgcctccagagaagagtagaaaggagttggag

SEQ ID NO: 194856 - DNA, 75 bp, Homo sapiens
actggagcgctgggtctgaaattcaaaagtgccgcctccagagaagagtagaaaggagttggagtgtaccaatgc

SEQ ID NO: 194857 - DNA, 76 bp, Homo sapiens
tctgaaattcaaaagtgccgcctccagagaagagtagaaaggagttggagtgtaccaatgcgaggcgagagaggac

SEQ ID NO: 194858 - DNA, 75 bp, Homo sapiens
aattcaaaagtgccgcctccagagaagagtagaaaggagttggagtgtaccaatgcgaggcgagagaggacgctg

SEQ ID NO: 194859 - DNA, 78 bp, Homo sapiens
cctccagagaagagtagaaaggagttggagtgtaccaatgcgaggcgagagaggacgctgggctgaaacagaagtgca

SEQ ID NO: 194860 - DNA, 74 bp, Homo sapiens
aagagtagaaaggagttggagtgtaccaatgcgaggcgagagaggacgctgggctgaaacagaagtgcaccgtt

SEQ ID NO: 194861 - DNA, 73 bp, Homo sapiens
aaaggagttggagtgtaccaatgcgaggcgagagaggacgctgggctgaaacagaagtgcaccgtttgggacc

SEQ ID NO: 194862 - DNA, 76 bp, Homo sapiens
ggtccaggccgggacgtgcgcagggccgcggccaggtttatctcaccagagccattgggtccaatgatggcggtga

SEQ ID NO: 194863 - DNA, 76 bp, Homo sapiens
gggacgtgcgcagggccgcggccaggtttatctcaccagagccattgggtccaatgatggcggtgaacctctgaaa

SEQ ID NO: 194864 - DNA, 76 bp, Homo sapiens
cagggccgcggccaggtttatctcaccagagccattgggtccaatgatggcggtgaacctctgaaatggtccgata

SEQ ID NO: 194865 - DNA, 77 bp, Homo sapiens
gccaggtttatctcaccagagccattgggtccaatgatggcggtgaacctctgaaatggtccgataatctgtcgacc

SEQ ID NO: 194866 - DNA, 77 bp, Homo sapiens
tttatctcaccagagccattgggtccaatgatggcggtgaacctctgaaatggtccgataatctgtcgacccttgta

SEQ ID NO: 194867 - DNA, 73 bp, Homo sapiens
agccattgggtccaatgatggcggtgaacctctgaaatggtccgataatctgtcgacccttgtacgacttaaa

SEQ ID NO: 194868 - DNA, 73 bp, Homo sapiens
ggtccaatgatggcggtgaacctctgaaatggtccgataatctgtcgacccttgtacgacttaaagttctcaa

SEQ ID NO: 194869 - DNA, 72 bp, Homo sapiens
cggtgaacctctgaaatggtccgataatctgtcgacccttgtacgacttaaagttctcaatctcaatcagtt

SEQ ID NO: 194870 - DNA, 73 bp, Homo sapiens
aacctctgaaatggtccgataatctgtcgacccttgtacgacttaaagttctcaatctcaatcagtttcagga

SEQ ID NO: 194871 - DNA, 73 bp, Homo sapiens
atggtccgataatctgtcgacccttgtacgacttaaagttctcaatctcaatcagtttcaggaaccccatgac

SEQ ID NO: 194872 - DNA, 72 bp, Homo sapiens
aatctgtcgacccttgtacgacttaaagttctcaatctcaatcagtttcaggaaccccatgacggccgcggc

SEQ ID NO: 194873 - DNA, 73 bp, Homo sapiens
cttgtacgacttaaagttctcaatctcaatcagtttcaggaaccccatgacggccgcggcgccggcggcagta

SEQ ID NO: 194874 - DNA, 73 bp, Homo sapiens
acttaaagttctcaatctcaatcagtttcaggaaccccatgacggccgcggcgccggcggcagtaggacaggc

SEQ ID NO: 194875 - DNA, 73 bp, Homo sapiens
aatctcaatcagtttcaggaaccccatgacggccgcggcgccggcggcagtaggacaggccgcgccgtacgcc

SEQ ID NO: 194876 - DNA, 72 bp, Homo sapiens
tttcaggaaccccatgacggccgcggcgccggcggcagtaggacaggccgcgccgtacgcccgagaactgag

SEQ ID NO: 194877 - DNA, 73 bp, Homo sapiens
cccatgacggccgcggcgccggcggcagtaggacaggccgcgccgtacgcccgagaactgaggtagcccgcgc

SEQ ID NO: 194878 - DNA, 70 bp, Homo sapiens
ccgcggcgccggcggcagtaggacaggccgcgccgtacgcccgagaactgaggtagcccgcgcgggaaac

SEQ ID NO: 194879 - DNA, 73 bp, Homo sapiens
cggcggcagtaggacaggccgcgccgtacgcccgagaactgaggtagcccgcgcgggaaacgccgcagtgcaa

SEQ ID NO: 194880 - DNA, 71 bp, Homo sapiens
agtaggacaggccgcgccgtacgcccgagaactgaggtagcccgcgcgggaaacgccgcagtgcaagccgg

SEQ ID NO: 194881 - DNA, 78 bp, Homo sapiens
ttacatttggtaaatgaagaaccagttttagccagatgattgcagtgactatggcagcattttaataagataacatac

SEQ ID NO: 194882 - DNA, 78 bp, Homo sapiens
ggtaaatgaagaaccagttttagccagatgattgcagtgactatggcagcattttaataagataacatactcatttaa

SEQ ID NO: 194883 - DNA, 78 bp, Homo sapiens
cagttttagccagatgattgcagtgactatggcagcattttaataagataacatactcatttaacacagcctttattt

SEQ ID NO: 194884 - DNA, 81 bp, Homo sapiens
tagccagatgattgcagtgactatggcagcattttaataagataacatactcatttaacacagcctttattttctgtttca

SEQ ID NO: 194885 - DNA, 77 bp, Homo sapiens
ttgcagtgactatggcagcattttaataagataacatactcatttaacacagcctttattttctgtttcaaaacaga

SEQ ID NO: 194886 - DNA, 72 bp, Homo sapiens
ggcagcattttaataagataacatactcatttaacacagcctttattttctgtttcaaaacagaatttccag

SEQ ID NO: 194887 - DNA, 70 bp, Homo sapiens
tttaataagataacatactcatttaacacagcctttattttctgtttcaaaacagaatttccaggaaaca

SEQ ID NO: 194888 - DNA, 69 bp, Homo sapiens
gataacatactcatttaacacagcctttattttctgtttcaaaacagaatttccaggaaacaaaacaaa

SEQ ID NO: 194889 - DNA, 66 bp, Homo sapiens
caaaacaaaatacttacaatggttgggtacaaatgaaataaaaatcacagtttcaaagaaccaaaa

SEQ ID NO: 194890 - DNA, 71 bp, Homo sapiens
tacttacaatggttgggtacaaatgaaataaaaatcacagtttcaaagaaccaaaataagacagttgctga

SEQ ID NO: 194891 - DNA, 72 bp, Homo sapiens
ggttgggtacaaatgaaataaaaatcacagtttcaaagaaccaaaataagacagttgctgaaaggcagatca

SEQ ID NO: 194892 - DNA, 72 bp, Homo sapiens
ggtacaaatgaaataaaaatcacagtttcaaagaaccaaaataagacagttgctgaaaggcagatcacttgg

SEQ ID NO: 194893 - DNA, 69 bp, Homo sapiens
aaaaatcacagtttcaaagaaccaaaataagacagttgctgaaaggcagatcacttggtttaccaaaaa

SEQ ID NO: 194894 - DNA, 68 bp, Homo sapiens
cacagtttcaaagaaccaaaataagacagttgctgaaaggcagatcacttggtttaccaaaaaaaaaa

SEQ ID NO: 194895 - DNA, 66 bp, Homo sapiens
aaaaaaaggttaatgtcaaaaaggattaaaattaactttaacaacattctatataatgctacattc

SEQ ID NO: 194896 - DNA, 66 bp, Homo sapiens
aaaaaaggttaatgtcaaaaaggattaaaattaactttaacaacattctatataatgctacattcc

SEQ ID NO: 194897 - DNA, 69 bp, Homo sapiens
gttaatgtcaaaaaggattaaaattaactttaacaacattctatataatgctacattccccaattaaga

SEQ ID NO: 194898 - DNA, 70 bp, Homo sapiens
aggattaaaattaactttaacaacattctatataatgctacattccccaattaagaaaggagagttcaca

SEQ ID NO: 194899 - DNA, 72 bp, Homo sapiens
attaactttaacaacattctatataatgctacattccccaattaagaaaggagagttcacatatacaactaa

SEQ ID NO: 194900 - DNA, 75 bp, Homo sapiens
caacattctatataatgctacattccccaattaagaaaggagagttcacatatacaactaaatgttaagtgtgga

SEQ ID NO: 194901 - DNA, 75 bp, Homo sapiens
tctatataatgctacattccccaattaagaaaggagagttcacatatacaactaaatgttaagtgtggagaagag

SEQ ID NO: 194902 - DNA, 70 bp, Homo sapiens
acattccccaattaagaaaggagagttcacatatacaactaaatgttaagtgtggagaagagggtgaaat

SEQ ID NO: 194903 - DNA, 75 bp, Homo sapiens
ttaagaaaggagagttcacatatacaactaaatgttaagtgtggagaagagggtgaaattctgcatacttcatag

SEQ ID NO: 194904 - DNA, 78 bp, Homo sapiens
agagttcacatatacaactaaatgttaagtgtggagaagagggtgaaattctgcatacttcatagtaaattatgctga

SEQ ID NO: 194905 - DNA, 76 bp, Homo sapiens
cacatatacaactaaatgttaagtgtggagaagagggtgaaattctgcatacttcatagtaaattatgctgaaagt

SEQ ID NO: 194906 - DNA, 75 bp, Homo sapiens
aaatgttaagtgtggagaagagggtgaaattctgcatacttcatagtaaattatgctgaaagtttattaattgca

SEQ ID NO: 194907 - DNA, 76 bp, Homo sapiens
gtggagaagagggtgaaattctgcatacttcatagtaaattatgctgaaagtttattaattgcataaacttcctga

SEQ ID NO: 194908 - DNA, 76 bp, Homo sapiens
gaagagggtgaaattctgcatacttcatagtaaattatgctgaaagtttattaattgcataaacttcctgagtggc

SEQ ID NO: 194909 - DNA, 80 bp, Homo sapiens
aattctgcatacttcatagtaaattatgctgaaagtttattaattgcataaacttcctgagtggctcccatgctgcacta

SEQ ID NO: 194910 - DNA, 81 bp, Homo sapiens
tcatagtaaattatgctgaaagtttattaattgcataaacttcctgagtggctcccatgctgcactaggtctacatgctta

SEQ ID NO: 194911 - DNA, 80 bp, Homo sapiens
taaattatgctgaaagtttattaattgcataaacttcctgagtggctcccatgctgcactaggtctacatgcttaatata

SEQ ID NO: 194912 - DNA, 79 bp, Homo sapiens
tgaaagtttattaattgcataaacttcctgagtggctcccatgctgcactaggtctacatgcttaatatatcaaacaaa

SEQ ID NO: 194913 - DNA, 77 bp, Homo sapiens
aaagtttattaattgcataaacttcctgagtggctcccatgctgcactaggtctacatgcttaatatatcaaacaaa

SEQ ID NO: 194914 - DNA, 79 bp, Homo sapiens
gtttattaattgcataaacttcctgagtggctcccatgctgcactaggtctacatgcttaatatatcaaacaaattata

SEQ ID NO: 194915 - DNA, 80 bp, Homo sapiens
ttaattgcataaacttcctgagtggctcccatgctgcactaggtctacatgcttaatatatcaaacaaattatagcttta

SEQ ID NO: 194916 - DNA, 79 bp, Homo sapiens
aaacttcctgagtggctcccatgctgcactaggtctacatgcttaatatatcaaacaaattatagctttaggtgattga

SEQ ID NO: 194917 - DNA, 82 bp, Homo sapiens
agtggctcccatgctgcactaggtctacatgcttaatatatcaaacaaattatagctttaggtgattgagcatgacagacct

SEQ ID NO: 194918 - DNA, 83 bp, Homo sapiens
ctcccatgctgcactaggtctacatgcttaatatatcaaacaaattatagctttaggtgattgagcatgacagaccttgaaca

SEQ ID NO: 194919 - DNA, 83 bp, Homo sapiens
tcccatgctgcactaggtctacatgcttaatatatcaaacaaattatagctttaggtgattgagcatgacagaccttgaacaa

SEQ ID NO: 194920 - DNA, 82 bp, Homo sapiens
tgcactaggtctacatgcttaatatatcaaacaaattatagctttaggtgattgagcatgacagaccttgaacaactgcact

SEQ ID NO: 194921 - DNA, 80 bp, Homo sapiens
taggtctacatgcttaatatatcaaacaaattatagctttaggtgattgagcatgacagaccttgaacaactgcactttc

SEQ ID NO: 194922 - DNA, 80 bp, Homo sapiens
tacatgcttaatatatcaaacaaattatagctttaggtgattgagcatgacagaccttgaacaactgcactttccagtta

SEQ ID NO: 194923 - DNA, 79 bp, Homo sapiens
atatatcaaacaaattatagctttaggtgattgagcatgacagaccttgaacaactgcactttccagttagtcactgta

SEQ ID NO: 194924 - DNA, 78 bp, Homo sapiens
cttgaacaactgcactttccagttagtcactgtatctgctgagggtatgttctggaccgcaaacctcaatctcaaatc

SEQ ID NO: 194925 - DNA, 75 bp, Homo sapiens
agttagtcactgtatctgctgagggtatgttctggaccgcaaacctcaatctcaaatcttaagttacagtggaaa

SEQ ID NO: 194926 - DNA, 71 bp, Homo sapiens
tgagggtatgttctggaccgcaaacctcaatctcaaatcttaagttacagtggaaaagaaattcaacttaa

SEQ ID NO: 194927 - DNA, 66 bp, Homo sapiens
ccgcaaacctcaatctcaaatcttaagttacagtggaaaagaaattcaacttaaaaaaaaactaga

SEQ ID NO: 194928 - DNA, 69 bp, Homo sapiens
ctcaaatcttaagttacagtggaaaagaaattcaacttaaaaaaaaactagaggatgacaagcacgcat

SEQ ID NO: 194929 - DNA, 67 bp, Homo sapiens
aagttacagtggaaaagaaattcaacttaaaaaaaaactagaggatgacaagcacgcatttaggagt

SEQ ID NO: 194930 - DNA, 67 bp, Homo sapiens
cagtggaaaagaaattcaacttaaaaaaaaactagaggatgacaagcacgcatttaggagtttattt

SEQ ID NO: 194931 - DNA, 70 bp, Homo sapiens
gaaattcaacttaaaaaaaaactagaggatgacaagcacgcatttaggagtttattttatactggcacat

SEQ ID NO: 194932 - DNA, 70 bp, Homo sapiens
aaaaaaactagaggatgacaagcacgcatttaggagtttattttatactggcacatttttttctcagaac

SEQ ID NO: 194933 - DNA, 71 bp, Homo sapiens
aactagaggatgacaagcacgcatttaggagtttattttatactggcacatttttttctcagaacccagtt

SEQ ID NO: 194934 - DNA, 69 bp, Homo sapiens
aagcacgcatttaggagtttattttatactggcacatttttttctcagaacccagtttctctcttccct

SEQ ID NO: 194935 - DNA, 69 bp, Homo sapiens
catttaggagtttattttatactggcacatttttttctcagaacccagtttctctcttcccttcttgct

SEQ ID NO: 194936 - DNA, 69 bp, Homo sapiens
tattttatactggcacatttttttctcagaacccagtttctctcttcccttcttgcttgacttttaacc

SEQ ID NO: 194937 - DNA, 68 bp, Homo sapiens
gcacatttttttctcagaacccagtttctctcttcccttcttgcttgacttttaaccttgtttgaatt

SEQ ID NO: 194938 - DNA, 65 bp, Homo sapiens
ttttttctcagaacccagtttctctcttcccttcttgcttgacttttaaccttgtttgaattttt

SEQ ID NO: 194939 - DNA, 70 bp, Homo sapiens
aaaccttccagaataggagctattggtttgtacactcgtctagctatcttagttgaaaataactttagtg

SEQ ID NO: 194940 - DNA, 71 bp, Homo sapiens
cagaataggagctattggtttgtacactcgtctagctatcttagttgaaaataactttagtgtaacctagt

SEQ ID NO: 194941 - DNA, 71 bp, Homo sapiens
gctattggtttgtacactcgtctagctatcttagttgaaaataactttagtgtaacctagttactatccca

SEQ ID NO: 194942 - DNA, 73 bp, Homo sapiens
tacactcgtctagctatcttagttgaaaataactttagtgtaacctagttactatcccaggctccttcatata

SEQ ID NO: 194943 - DNA, 75 bp, Homo sapiens
tctagctatcttagttgaaaataactttagtgtaacctagttactatcccaggctccttcatatattggctgtca

SEQ ID NO: 194944 - DNA, 73 bp, Homo sapiens
agctatcttagttgaaaataactttagtgtaacctagttactatcccaggctccttcatatattggctgtcag

SEQ ID NO: 194945 - DNA, 71 bp, Homo sapiens
ttagttgaaaataactttagtgtaacctagttactatcccaggctccttcatatattggctgtcagggttc

SEQ ID NO: 194946 - DNA, 75 bp, Homo sapiens
tgtaacctagttactatcccaggctccttcatatattggctgtcagggttcctgaccaatgtttgtgttgatctt

SEQ ID NO: 194947 - DNA, 78 bp, Homo sapiens
tagttactatcccaggctccttcatatattggctgtcagggttcctgaccaatgtttgtgttgatctttcacatacaa

SEQ ID NO: 194948 - DNA, 77 bp, Homo sapiens
cttcatatattggctgtcagggttcctgaccaatgtttgtgttgatctttcacatacaaagactatttccagggtga

SEQ ID NO: 194949 - DNA, 76 bp, Homo sapiens
tattggctgtcagggttcctgaccaatgtttgtgttgatctttcacatacaaagactatttccagggtgacctgaa

SEQ ID NO: 194950 - DNA, 75 bp, Homo sapiens
ttcctgaccaatgtttgtgttgatctttcacatacaaagactatttccagggtgacctgaaggcatttggttcca

SEQ ID NO: 194951 - DNA, 72 bp, Homo sapiens
aatgtttgtgttgatctttcacatacaaagactatttccagggtgacctgaaggcatttggttccataaaaa

SEQ ID NO: 194952 - DNA, 70 bp, Homo sapiens
cctgaaggcatttggttccataaaaatttcatactaatttcaattcaaaggattttatcaagtttgagtg

SEQ ID NO: 194953 - DNA, 71 bp, Homo sapiens
ttccataaaaatttcatactaatttcaattcaaaggattttatcaagtttgagtgttactatcttacgatc

SEQ ID NO: 194954 - DNA, 72 bp, Homo sapiens
aatttcatactaatttcaattcaaaggattttatcaagtttgagtgttactatcttacgatctgcattttta

SEQ ID NO: 194955 - DNA, 70 bp, Homo sapiens
atactaatttcaattcaaaggattttatcaagtttgagtgttactatcttacgatctgcatttttaaaat

SEQ ID NO: 194956 - DNA, 72 bp, Homo sapiens
caattcaaaggattttatcaagtttgagtgttactatcttacgatctgcatttttaaaatttcaatcttaga

SEQ ID NO: 194957 - DNA, 73 bp, Homo sapiens
tatcaagtttgagtgttactatcttacgatctgcatttttaaaatttcaatcttagaaattacacctatcaaa

SEQ ID NO: 194958 - DNA, 72 bp, Homo sapiens
gagtgttactatcttacgatctgcatttttaaaatttcaatcttagaaattacacctatcaaatcaaaggcc

SEQ ID NO: 194959 - DNA, 70 bp, Homo sapiens
ttactatcttacgatctgcatttttaaaatttcaatcttagaaattacacctatcaaatcaaaggccttt

SEQ ID NO: 194960 - DNA, 62 bp, Homo sapiens
aaaggccttttctacacaccaccccccttttctgattcctcttctaaacaaagggagggggg

SEQ ID NO: 194961 - DNA, 64 bp, Homo sapiens
ttttctacacaccaccccccttttctgattcctcttctaaacaaagggagggggggaacaagtc

SEQ ID NO: 194962 - DNA, 67 bp, Homo sapiens
tttctgattcctcttctaaacaaagggagggggggaacaagtccttgataaactacagattcaaaaa

SEQ ID NO: 194963 - DNA, 67 bp, Homo sapiens
tcttctaaacaaagggagggggggaacaagtccttgataaactacagattcaaaaaacaatcttcta

SEQ ID NO: 194964 - DNA, 65 bp, Homo sapiens
aacaaagggagggggggaacaagtccttgataaactacagattcaaaaaacaatcttctagaaaa

SEQ ID NO: 194965 - DNA, 74 bp, Homo sapiens
aagtccttgataaactacagattcaaaaaacaatcttctagaaaatggcctgcataccacctcagatagttcaa

SEQ ID NO: 194966 - DNA, 73 bp, Homo sapiens
aactacagattcaaaaaacaatcttctagaaaatggcctgcataccacctcagatagttcaagtttttctgac

SEQ ID NO: 194967 - DNA, 73 bp, Homo sapiens
aatcttctagaaaatggcctgcataccacctcagatagttcaagtttttctgacccaaacagaagataaaata

SEQ ID NO: 194968 - DNA, 73 bp, Homo sapiens
agaaaatggcctgcataccacctcagatagttcaagtttttctgacccaaacagaagataaaataactgaatc

SEQ ID NO: 194969 - DNA, 73 bp, Homo sapiens
ataccacctcagatagttcaagtttttctgacccaaacagaagataaaataactgaatcccaaaatgatggca

SEQ ID NO: 194970 - DNA, 73 bp, Homo sapiens
gatagttcaagtttttctgacccaaacagaagataaaataactgaatcccaaaatgatggcaaatatacctca

SEQ ID NO: 194971 - DNA, 72 bp, Homo sapiens
caagtttttctgacccaaacagaagataaaataactgaatcccaaaatgatggcaaatatacctcaggaatg

SEQ ID NO: 194972 - DNA, 76 bp, Homo sapiens
tttctgacccaaacagaagataaaataactgaatcccaaaatgatggcaaatatacctcaggaatgtacttatgca

SEQ ID NO: 194973 - DNA, 76 bp, Homo sapiens
cccaaacagaagataaaataactgaatcccaaaatgatggcaaatatacctcaggaatgtacttatgcataatgac

SEQ ID NO: 194974 - DNA, 78 bp, Homo sapiens
gaagataaaataactgaatcccaaaatgatggcaaatatacctcaggaatgtacttatgcataatgactgaaatacag

SEQ ID NO: 194975 - DNA, 78 bp, Homo sapiens
gataaaataactgaatcccaaaatgatggcaaatatacctcaggaatgtacttatgcataatgactgaaatacagtat

SEQ ID NO: 194976 - DNA, 77 bp, Homo sapiens
aactgaatcccaaaatgatggcaaatatacctcaggaatgtacttatgcataatgactgaaatacagtatttaccaa

SEQ ID NO: 194977 - DNA, 78 bp, Homo sapiens
actgaatcccaaaatgatggcaaatatacctcaggaatgtacttatgcataatgactgaaatacagtatttaccaata

SEQ ID NO: 194978 - DNA, 77 bp, Homo sapiens
atcccaaaatgatggcaaatatacctcaggaatgtacttatgcataatgactgaaatacagtatttaccaatattaa

SEQ ID NO: 194979 - DNA, 80 bp, Homo sapiens
gatggcaaatatacctcaggaatgtacttatgcataatgactgaaatacagtatttaccaatattaaatatgctgtagtg

SEQ ID NO: 194980 - DNA, 78 bp, Homo sapiens
atgcataatgactgaaatacagtatttaccaatattaaatatgctgtagtgttacacagtaaacatgtgaaacaagga

SEQ ID NO: 194981 - DNA, 74 bp, Homo sapiens
gtatttaccaatattaaatatgctgtagtgttacacagtaaacatgtgaaacaaggaacatctggttacaaaca

SEQ ID NO: 194982 - DNA, 76 bp, Homo sapiens
ccaatattaaatatgctgtagtgttacacagtaaacatgtgaaacaaggaacatctggttacaaacatttgctgag

SEQ ID NO: 194983 - DNA, 75 bp, Homo sapiens
aatatgctgtagtgttacacagtaaacatgtgaaacaaggaacatctggttacaaacatttgctgagttttcaag

SEQ ID NO: 194984 - DNA, 71 bp, Homo sapiens
agtgttacacagtaaacatgtgaaacaaggaacatctggttacaaacatttgctgagttttcaaggaaaaa

SEQ ID NO: 194985 - DNA, 69 bp, Homo sapiens
cagtaaacatgtgaaacaaggaacatctggttacaaacatttgctgagttttcaaggaaaaaaaaggaa

SEQ ID NO: 194986 - DNA, 76 bp, Homo sapiens
tctggttacaaacatttgctgagttttcaaggaaaaaaaaggaatgcatcattttcatcactcagaaaagacagca

SEQ ID NO: 194987 - DNA, 75 bp, Homo sapiens
caaacatttgctgagttttcaaggaaaaaaaaggaatgcatcattttcatcactcagaaaagacagcaaagaaga

SEQ ID NO: 194988 - DNA, 75 bp, Homo sapiens
ctgagttttcaaggaaaaaaaaggaatgcatcattttcatcactcagaaaagacagcaaagaagaaagtcaatgc

SEQ ID NO: 194989 - DNA, 74 bp, Homo sapiens
ggaaaaaaaaggaatgcatcattttcatcactcagaaaagacagcaaagaagaaagtcaatgcttccataaact

SEQ ID NO: 194990 - DNA, 77 bp, Homo sapiens
aaaggaatgcatcattttcatcactcagaaaagacagcaaagaagaaagtcaatgcttccataaactttagagattg

SEQ ID NO: 194991 - DNA, 77 bp, Homo sapiens
gcatcattttcatcactcagaaaagacagcaaagaagaaagtcaatgcttccataaactttagagattggataaagt

SEQ ID NO: 194992 - DNA, 75 bp, Homo sapiens
catcactcagaaaagacagcaaagaagaaagtcaatgcttccataaactttagagattggataaagttatataaa

SEQ ID NO: 194993 - DNA, 71 bp, Homo sapiens
gaagaaagtcaatgcttccataaactttagagattggataaagttatataaaacccttactatcaactaca

SEQ ID NO: 194994 - DNA, 71 bp, Homo sapiens
gtcaatgcttccataaactttagagattggataaagttatataaaacccttactatcaactacatttcaac

SEQ ID NO: 194995 - DNA, 70 bp, Homo sapiens
gagattggataaagttatataaaacccttactatcaactacatttcaactaaatgcatttggccgtttta

SEQ ID NO: 194996 - DNA, 67 bp, Homo sapiens
agttatataaaacccttactatcaactacatttcaactaaatgcatttggccgttttaaggtaacaa

SEQ ID NO: 194997 - DNA, 66 bp, Homo sapiens
aaaacccttactatcaactacatttcaactaaatgcatttggccgttttaaggtaacaaaatacca

SEQ ID NO: 194998 - DNA, 71 bp, Homo sapiens
atcaactacatttcaactaaatgcatttggccgttttaaggtaacaaaataccactgcaaatacctagcac

SEQ ID NO: 194999 - DNA, 74 bp, Homo sapiens
ttcaactaaatgcatttggccgttttaaggtaacaaaataccactgcaaatacctagcactgtgctaatatatg

SEQ ID NO: 195000 - DNA, 74 bp, Homo sapiens
ctaaatgcatttggccgttttaaggtaacaaaataccactgcaaatacctagcactgtgctaatatatgttgaa

SEQ ID NO: 195001 - DNA, 77 bp, Homo sapiens
cgttttaaggtaacaaaataccactgcaaatacctagcactgtgctaatatatgttgaatgataggccattgctgaa

SEQ ID NO: 195002 - DNA, 80 bp, Homo sapiens
aaataccactgcaaatacctagcactgtgctaatatatgttgaatgataggccattgctgaaggatttgtcaaatatttc

SEQ ID NO: 195003 - DNA, 80 bp, Homo sapiens
tgtgctaatatatgttgaatgataggccattgctgaaggatttgtcaaatatttcgctgtggtagttaaagcaatttcaa

SEQ ID NO: 195004 - DNA, 77 bp, Homo sapiens
tatatgttgaatgataggccattgctgaaggatttgtcaaatatttcgctgtggtagttaaagcaatttcaacccat

SEQ ID NO: 195005 - DNA, 75 bp, Homo sapiens
tgataggccattgctgaaggatttgtcaaatatttcgctgtggtagttaaagcaatttcaacccattgcccttta

SEQ ID NO: 195006 - DNA, 74 bp, Homo sapiens
attgctgaaggatttgtcaaatatttcgctgtggtagttaaagcaatttcaacccattgccctttaggcacaca

SEQ ID NO: 195007 - DNA, 75 bp, Homo sapiens
tttgtcaaatatttcgctgtggtagttaaagcaatttcaacccattgccctttaggcacacagacgagaaatgca

SEQ ID NO: 195008 - DNA, 75 bp, Homo sapiens
aaatatttcgctgtggtagttaaagcaatttcaacccattgccctttaggcacacagacgagaaatgcatctcta

SEQ ID NO: 195009 - DNA, 73 bp, Homo sapiens
ctgtggtagttaaagcaatttcaacccattgccctttaggcacacagacgagaaatgcatctctaataaaaaa

SEQ ID NO: 195010 - DNA, 76 bp, Homo sapiens
ttcaacccattgccctttaggcacacagacgagaaatgcatctctaataaaaaatgcaaagttataggcactggat

SEQ ID NO: 195011 - DNA, 77 bp, Homo sapiens
tttaggcacacagacgagaaatgcatctctaataaaaaatgcaaagttataggcactggattgtctaattcaggtac

SEQ ID NO: 195012 - DNA, 76 bp, Homo sapiens
cacagacgagaaatgcatctctaataaaaaatgcaaagttataggcactggattgtctaattcaggtactttctta

SEQ ID NO: 195013 - DNA, 74 bp, Homo sapiens
gagaaatgcatctctaataaaaaatgcaaagttataggcactggattgtctaattcaggtactttcttaccatt

SEQ ID NO: 195014 - DNA, 70 bp, Homo sapiens
ctctaataaaaaatgcaaagttataggcactggattgtctaattcaggtactttcttaccatttgtttat

SEQ ID NO: 195015 - DNA, 69 bp, Homo sapiens
aggcactggattgtctaattcaggtactttcttaccatttgtttattttataactaactcctacaccta

SEQ ID NO: 195016 - DNA, 67 bp, Homo sapiens
ggattgtctaattcaggtactttcttaccatttgtttattttataactaactcctacacctaaatcc

SEQ ID NO: 195017 - DNA, 69 bp, Homo sapiens
tcaggtactttcttaccatttgtttattttataactaactcctacacctaaatcctatattgccaccaa

SEQ ID NO: 195018 - DNA, 68 bp, Homo sapiens
ctttcttaccatttgtttattttataactaactcctacacctaaatcctatattgccaccaatttcaa

SEQ ID NO: 195019 - DNA, 72 bp, Homo sapiens
gtttattttataactaactcctacacctaaatcctatattgccaccaatttcaattattcttctgctctcca

SEQ ID NO: 195020 - DNA, 71 bp, Homo sapiens
ttttataactaactcctacacctaaatcctatattgccaccaatttcaattattcttctgctctccacccc

SEQ ID NO: 195021 - DNA, 71 bp, Homo sapiens
aactcctacacctaaatcctatattgccaccaatttcaattattcttctgctctccacccccaaatcccca

SEQ ID NO: 195022 - DNA, 75 bp, Homo sapiens
taaatcctatattgccaccaatttcaattattcttctgctctccacccccaaatccccaaagcatatttcacaga

SEQ ID NO: 195023 - DNA, 77 bp, Homo sapiens
atattgccaccaatttcaattattcttctgctctccacccccaaatccccaaagcatatttcacagaagcacatggc

SEQ ID NO: 195024 - DNA, 76 bp, Homo sapiens
tttcaattattcttctgctctccacccccaaatccccaaagcatatttcacagaagcacatggctctccacttaaa

SEQ ID NO: 195025 - DNA, 80 bp, Homo sapiens
tattcttctgctctccacccccaaatccccaaagcatatttcacagaagcacatggctctccacttaaacacagatgaga

SEQ ID NO: 195026 - DNA, 81 bp, Homo sapiens
cacccccaaatccccaaagcatatttcacagaagcacatggctctccacttaaacacagatgagagtgatgatccctctca

SEQ ID NO: 195027 - DNA, 82 bp, Homo sapiens
aaatccccaaagcatatttcacagaagcacatggctctccacttaaacacagatgagagtgatgatccctctcatctcaaac

SEQ ID NO: 195028 - DNA, 86 bp, Homo sapiens
aaagcatatttcacagaagcacatggctctccacttaaacacagatgagagtgatgatccctctcatctcaaactgttggctagca

SEQ ID NO: 195029 - DNA, 82 bp, Homo sapiens
agaagcacatggctctccacttaaacacagatgagagtgatgatccctctcatctcaaactgttggctagcactgggaaaaa

SEQ ID NO: 195030 - DNA, 80 bp, Homo sapiens
acatggctctccacttaaacacagatgagagtgatgatccctctcatctcaaactgttggctagcactgggaaaaaagag

SEQ ID NO: 195031 - DNA, 81 bp, Homo sapiens
taaacacagatgagagtgatgatccctctcatctcaaactgttggctagcactgggaaaaaagaggcagaccagatttata

SEQ ID NO: 195032 - DNA, 77 bp, Homo sapiens
atgatccctctcatctcaaactgttggctagcactgggaaaaaagaggcagaccagatttataatctgaaagaatac

SEQ ID NO: 195033 - DNA, 75 bp, Homo sapiens
aaactgttggctagcactgggaaaaaagaggcagaccagatttataatctgaaagaatactgagaatcaaggcaa

SEQ ID NO: 195034 - DNA, 71 bp, Homo sapiens
actgggaaaaaagaggcagaccagatttataatctgaaagaatactgagaatcaaggcaaaaaagcaagtt

SEQ ID NO: 195035 - DNA, 73 bp, Homo sapiens
aaaaagaggcagaccagatttataatctgaaagaatactgagaatcaaggcaaaaaagcaagtttcacaggta

SEQ ID NO: 195036 - DNA, 75 bp, Homo sapiens
ccagatttataatctgaaagaatactgagaatcaaggcaaaaaagcaagtttcacaggtagtgtttacttgtgca

SEQ ID NO: 195037 - DNA, 74 bp, Homo sapiens
tataatctgaaagaatactgagaatcaaggcaaaaaagcaagtttcacaggtagtgtttacttgtgcacccaaa

SEQ ID NO: 195038 - DNA, 73 bp, Homo sapiens
aatactgagaatcaaggcaaaaaagcaagtttcacaggtagtgtttacttgtgcacccaaaacagcactgaaa

SEQ ID NO: 195039 - DNA, 71 bp, Homo sapiens
atcaaggcaaaaaagcaagtttcacaggtagtgtttacttgtgcacccaaaacagcactgaaaacgaggta

SEQ ID NO: 195040 - DNA, 69 bp, Homo sapiens
aaaagcaagtttcacaggtagtgtttacttgtgcacccaaaacagcactgaaaacgaggtagttaaaca

SEQ ID NO: 195041 - DNA, 67 bp, Homo sapiens
aagtttcacaggtagtgtttacttgtgcacccaaaacagcactgaaaacgaggtagttaaacaaaat

SEQ ID NO: 195042 - DNA, 69 bp, Homo sapiens
gtagtgtttacttgtgcacccaaaacagcactgaaaacgaggtagttaaacaaaattaattggactaga

SEQ ID NO: 195043 - DNA, 69 bp, Homo sapiens
tgtgcacccaaaacagcactgaaaacgaggtagttaaacaaaattaattggactagaattaaatctggg

SEQ ID NO: 195044 - DNA, 65 bp, Homo sapiens
cccaaaacagcactgaaaacgaggtagttaaacaaaattaattggactagaattaaatctggggt

SEQ ID NO: 195045 - DNA, 67 bp, Homo sapiens
cactgaaaacgaggtagttaaacaaaattaattggactagaattaaatctggggttctaaaatgata

SEQ ID NO: 195046 - DNA, 69 bp, Homo sapiens
gaggtagttaaacaaaattaattggactagaattaaatctggggttctaaaatgatatatcccatcaaa

SEQ ID NO: 195047 - DNA, 73 bp, Homo sapiens
aattaattggactagaattaaatctggggttctaaaatgatatatcccatcaaactgtacataacactccaca

SEQ ID NO: 195048 - DNA, 75 bp, Homo sapiens
gactagaattaaatctggggttctaaaatgatatatcccatcaaactgtacataacactccacactcaatccaaa

SEQ ID NO: 195049 - DNA, 75 bp, Homo sapiens
attaaatctggggttctaaaatgatatatcccatcaaactgtacataacactccacactcaatccaaaaatcaca

SEQ ID NO: 195050 - DNA, 77 bp, Homo sapiens
tctaaaatgatatatcccatcaaactgtacataacactccacactcaatccaaaaatcacagcagaaaagtgccttt

SEQ ID NO: 195051 - DNA, 75 bp, Homo sapiens
tgtacataacactccacactcaatccaaaaatcacagcagaaaagtgccttttaaactttcacagataattttgc

SEQ ID NO: 195052 - DNA, 74 bp, Homo sapiens
cacactcaatccaaaaatcacagcagaaaagtgccttttaaactttcacagataattttgctgtcaaaccattg

SEQ ID NO: 195053 - DNA, 76 bp, Homo sapiens
cacagcagaaaagtgccttttaaactttcacagataattttgctgtcaaaccattggaattcatgcttgatataaa

SEQ ID NO: 195054 - DNA, 75 bp, Homo sapiens
gtgccttttaaactttcacagataattttgctgtcaaaccattggaattcatgcttgatataaaactggcaagga

SEQ ID NO: 195055 - DNA, 76 bp, Homo sapiens
taaactttcacagataattttgctgtcaaaccattggaattcatgcttgatataaaactggcaaggaagggatgaa

SEQ ID NO: 195056 - DNA, 76 bp, Homo sapiens
tttgctgtcaaaccattggaattcatgcttgatataaaactggcaaggaagggatgaaaaacagaatgaatatttg

SEQ ID NO: 195057 - DNA, 77 bp, Homo sapiens
ccattggaattcatgcttgatataaaactggcaaggaagggatgaaaaacagaatgaatatttgttatattacagca

SEQ ID NO: 195058 - DNA, 75 bp, Homo sapiens
ttcatgcttgatataaaactggcaaggaagggatgaaaaacagaatgaatatttgttatattacagcaaattacc

SEQ ID NO: 195059 - DNA, 71 bp, Homo sapiens
gatataaaactggcaaggaagggatgaaaaacagaatgaatatttgttatattacagcaaattaccttaaa

SEQ ID NO: 195060 - DNA, 73 bp, Homo sapiens
aggaagggatgaaaaacagaatgaatatttgttatattacagcaaattaccttaaatagagattcaagactgc

SEQ ID NO: 195061 - DNA, 74 bp, Homo sapiens
gggatgaaaaacagaatgaatatttgttatattacagcaaattaccttaaatagagattcaagactgctacaaa

SEQ ID NO: 195062 - DNA, 75 bp, Homo sapiens
cagaatgaatatttgttatattacagcaaattaccttaaatagagattcaagactgctacaaatatacatagggt

SEQ ID NO: 195063 - DNA, 74 bp, Homo sapiens
gttatattacagcaaattaccttaaatagagattcaagactgctacaaatatacatagggttattttcattaga

SEQ ID NO: 195064 - DNA, 74 bp, Homo sapiens
cagcaaattaccttaaatagagattcaagactgctacaaatatacatagggttattttcattagatttacacca

SEQ ID NO: 195065 - DNA, 74 bp, Homo sapiens
tatacatagggttattttcattagatttacaccaatactggtttcatattcttatgatgttacacccaacttca

SEQ ID NO: 195066 - DNA, 78 bp, Homo sapiens
ttattttcattagatttacaccaatactggtttcatattcttatgatgttacacccaacttcacagacatagcagcag

SEQ ID NO: 195067 - DNA, 82 bp, Homo sapiens
ttacaccaatactggtttcatattcttatgatgttacacccaacttcacagacatagcagcaggtacttcatgatgaaatgc

SEQ ID NO: 195068 - DNA, 84 bp, Homo sapiens
atgttacacccaacttcacagacatagcagcaggtacttcatgatgaaatgctcacattaccacatatggagatacagtactat

SEQ ID NO: 195069 - DNA, 90 bp, Homo sapiens
ttcacagacatagcagcaggtacttcatgatgaaatgctcacattaccacatatggagatacagtactattcatcagacttgcactttga

SEQ ID NO: 195070 - DNA, 83 bp, Homo sapiens
aggtacttcatgatgaaatgctcacattaccacatatggagatacagtactattcatcagacttgcactttgagaagtaaaca

SEQ ID NO: 195071 - DNA, 85 bp, Homo sapiens
tgaaatgctcacattaccacatatggagatacagtactattcatcagacttgcactttgagaagtaaacatggtggctggacata

SEQ ID NO: 195072 - DNA, 82 bp, Homo sapiens
acattaccacatatggagatacagtactattcatcagacttgcactttgagaagtaaacatggtggctggacatacagacta

SEQ ID NO: 195073 - DNA, 83 bp, Homo sapiens
atatggagatacagtactattcatcagacttgcactttgagaagtaaacatggtggctggacatacagactatcctctgaata

SEQ ID NO: 195074 - DNA, 79 bp, Homo sapiens
atacagtactattcatcagacttgcactttgagaagtaaacatggtggctggacatacagactatcctctgaataaact

SEQ ID NO: 195075 - DNA, 80 bp, Homo sapiens
ctattcatcagacttgcactttgagaagtaaacatggtggctggacatacagactatcctctgaataaactttacaagca

SEQ ID NO: 195076 - DNA, 77 bp, Homo sapiens
ttgcactttgagaagtaaacatggtggctggacatacagactatcctctgaataaactttacaagcaggatggttaa

SEQ ID NO: 195077 - DNA, 76 bp, Homo sapiens
ttgagaagtaaacatggtggctggacatacagactatcctctgaataaactttacaagcaggatggttaagtacaa

SEQ ID NO: 195078 - DNA, 73 bp, Homo sapiens
acatacagactatcctctgaataaactttacaagcaggatggttaagtacaaccattttctcctctacaagaa

SEQ ID NO: 195079 - DNA, 70 bp, Homo sapiens
actatcctctgaataaactttacaagcaggatggttaagtacaaccattttctcctctacaagaaggaaa

SEQ ID NO: 195080 - DNA, 69 bp, Homo sapiens
ctgaataaactttacaagcaggatggttaagtacaaccattttctcctctacaagaaggaaaatgaaaa

SEQ ID NO: 195081 - DNA, 67 bp, Homo sapiens
ggatggttaagtacaaccattttctcctctacaagaaggaaaatgaaaaggacaggtttgtgtgttt

SEQ ID NO: 195082 - DNA, 66 bp, Homo sapiens
gtacaaccattttctcctctacaagaaggaaaatgaaaaggacaggtttgtgtgttttttggaaag

SEQ ID NO: 195083 - DNA, 64 bp, Homo sapiens
tcctctacaagaaggaaaatgaaaaggacaggtttgtgtgttttttggaaaggaaggccctttt

SEQ ID NO: 195084 - DNA, 64 bp, Homo sapiens
gaaggaaaatgaaaaggacaggtttgtgtgttttttggaaaggaaggccctttttatatagtag

SEQ ID NO: 195085 - DNA, 65 bp, Homo sapiens
gaaaaggacaggtttgtgtgttttttggaaaggaaggccctttttatatagtaggctctttgtta

SEQ ID NO: 195086 - DNA, 67 bp, Homo sapiens
ggaaggccctttttatatagtaggctctttgttaagaagggaatttctgagctttacctcaagttaa

SEQ ID NO: 195087 - DNA, 67 bp, Homo sapiens
gccctttttatatagtaggctctttgttaagaagggaatttctgagctttacctcaagttaattatt

SEQ ID NO: 195088 - DNA, 69 bp, Homo sapiens
tatagtaggctctttgttaagaagggaatttctgagctttacctcaagttaattatttctggggaggaa

SEQ ID NO: 195089 - DNA, 68 bp, Homo sapiens
ttgttaagaagggaatttctgagctttacctcaagttaattatttctggggaggaaaagtacctcaga

SEQ ID NO: 195090 - DNA, 70 bp, Homo sapiens
gaatttctgagctttacctcaagttaattatttctggggaggaaaagtacctcagacaaggatgaaaata

SEQ ID NO: 195091 - DNA, 70 bp, Homo sapiens
agctttacctcaagttaattatttctggggaggaaaagtacctcagacaaggatgaaaatagcactatta

SEQ ID NO: 195092 - DNA, 74 bp, Homo sapiens
ctcaagttaattatttctggggaggaaaagtacctcagacaaggatgaaaatagcactattatatgatttagca

SEQ ID NO: 195093 - DNA, 74 bp, Homo sapiens
attatttctggggaggaaaagtacctcagacaaggatgaaaatagcactattatatgatttagcaaaattatga

SEQ ID NO: 195094 - DNA, 75 bp, Homo sapiens
gggaggaaaagtacctcagacaaggatgaaaatagcactattatatgatttagcaaaattatgaaataatgcaaa

SEQ ID NO: 195095 - DNA, 78 bp, Homo sapiens
gtacctcagacaaggatgaaaatagcactattatatgatttagcaaaattatgaaataatgcaaaagccctggataga

SEQ ID NO: 195096 - DNA, 76 bp, Homo sapiens
ggatgaaaatagcactattatatgatttagcaaaattatgaaataatgcaaaagccctggatagaaaactagccag

SEQ ID NO: 195097 - DNA, 77 bp, Homo sapiens
gcactattatatgatttagcaaaattatgaaataatgcaaaagccctggatagaaaactagccagtatttacagtca

SEQ ID NO: 195098 - DNA, 74 bp, Homo sapiens
atgatttagcaaaattatgaaataatgcaaaagccctggatagaaaactagccagtatttacagtcaaagtgac

SEQ ID NO: 195099 - DNA, 73 bp, Homo sapiens
aaaagccctggatagaaaactagccagtatttacagtcaaagtgactataatctgaaccaaacatgtaagtca

SEQ ID NO: 195100 - DNA, 74 bp, Homo sapiens
ctggatagaaaactagccagtatttacagtcaaagtgactataatctgaaccaaacatgtaagtcatgggaaaa

SEQ ID NO: 195101 - DNA, 71 bp, Homo sapiens
aactagccagtatttacagtcaaagtgactataatctgaaccaaacatgtaagtcatgggaaaaaataatt

SEQ ID NO: 195102 - DNA, 69 bp, Homo sapiens
tttacagtcaaagtgactataatctgaaccaaacatgtaagtcatgggaaaaaataattttaataaaac

SEQ ID NO: 195103 - DNA, 72 bp, Homo sapiens
gtgactataatctgaaccaaacatgtaagtcatgggaaaaaataattttaataaaaccccacagtgatgaga

SEQ ID NO: 195104 - DNA, 71 bp, Homo sapiens
aaaaaataattttaataaaaccccacagtgatgagaataacattgttttctccatttctgcacaagctcac

SEQ ID NO: 195105 - DNA, 71 bp, Homo sapiens
ataattttaataaaaccccacagtgatgagaataacattgttttctccatttctgcacaagctcacttttt

SEQ ID NO: 195106 - DNA, 81 bp, Homo sapiens
tatttttaaatgtacacatgttatatatacataatgtatacataacatatatgataacccggttactgcagtcagcatgga

SEQ ID NO: 195107 - DNA, 85 bp, Homo sapiens
taaatgtacacatgttatatatacataatgtatacataacatatatgataacccggttactgcagtcagcatggagacagcagta

SEQ ID NO: 195108 - DNA, 85 bp, Homo sapiens
ttatatatacataatgtatacataacatatatgataacccggttactgcagtcagcatggagacagcagtacactattcaccatc

SEQ ID NO: 195109 - DNA, 82 bp, Homo sapiens
ataatgtatacataacatatatgataacccggttactgcagtcagcatggagacagcagtacactattcaccatcttcaaac

SEQ ID NO: 195110 - DNA, 80 bp, Homo sapiens
acataacatatatgataacccggttactgcagtcagcatggagacagcagtacactattcaccatcttcaaactttagaa

SEQ ID NO: 195111 - DNA, 79 bp, Homo sapiens
atatatgataacccggttactgcagtcagcatggagacagcagtacactattcaccatcttcaaactttagaagactac

SEQ ID NO: 195112 - DNA, 75 bp, Homo sapiens
agtcagcatggagacagcagtacactattcaccatcttcaaactttagaagactacttttctttccagcaaaaac

SEQ ID NO: 195113 - DNA, 71 bp, Homo sapiens
agacagcagtacactattcaccatcttcaaactttagaagactacttttctttccagcaaaaacctgaaaa

SEQ ID NO: 195114 - DNA, 71 bp, Homo sapiens
gcagtacactattcaccatcttcaaactttagaagactacttttctttccagcaaaaacctgaaaagattg

SEQ ID NO: 195115 - DNA, 69 bp, Homo sapiens
caccatcttcaaactttagaagactacttttctttccagcaaaaacctgaaaagattgtaaatattaca

SEQ ID NO: 195116 - DNA, 70 bp, Homo sapiens
actttagaagactacttttctttccagcaaaaacctgaaaagattgtaaatattacaaggcactgcaaga

SEQ ID NO: 195117 - DNA, 74 bp, Homo sapiens
ttagaagactacttttctttccagcaaaaacctgaaaagattgtaaatattacaaggcactgcaagagtctgca

SEQ ID NO: 195118 - DNA, 73 bp, Homo sapiens
actacttttctttccagcaaaaacctgaaaagattgtaaatattacaaggcactgcaagagtctgcaggcaaa

SEQ ID NO: 195119 - DNA, 74 bp, Homo sapiens
ttttctttccagcaaaaacctgaaaagattgtaaatattacaaggcactgcaagagtctgcaggcaaacaagaa

SEQ ID NO: 195120 - DNA, 78 bp, Homo sapiens
agcaaaaacctgaaaagattgtaaatattacaaggcactgcaagagtctgcaggcaaacaagaatgatgaattatatg

SEQ ID NO: 195121 - DNA, 78 bp, Homo sapiens
aaacctgaaaagattgtaaatattacaaggcactgcaagagtctgcaggcaaacaagaatgatgaattatatgtggaa

SEQ ID NO: 195122 - DNA, 80 bp, Homo sapiens
gtaaatattacaaggcactgcaagagtctgcaggcaaacaagaatgatgaattatatgtggaatagaggtggtggccaaa

SEQ ID NO: 195123 - DNA, 82 bp, Homo sapiens
tattacaaggcactgcaagagtctgcaggcaaacaagaatgatgaattatatgtggaatagaggtggtggccaaaggcagaa

SEQ ID NO: 195124 - DNA, 82 bp, Homo sapiens
actgcaagagtctgcaggcaaacaagaatgatgaattatatgtggaatagaggtggtggccaaaggcagaacataggatgta

SEQ ID NO: 195125 - DNA, 81 bp, Homo sapiens
caggcaaacaagaatgatgaattatatgtggaatagaggtggtggccaaaggcagaacataggatgtagagcagtcattaa

SEQ ID NO: 195126 - DNA, 81 bp, Homo sapiens
aagaatgatgaattatatgtggaatagaggtggtggccaaaggcagaacataggatgtagagcagtcattaatacatgtaa

SEQ ID NO: 195127 - DNA, 81 bp, Homo sapiens
atgaattatatgtggaatagaggtggtggccaaaggcagaacataggatgtagagcagtcattaatacatgtaattgtaca

SEQ ID NO: 195128 - DNA, 83 bp, Homo sapiens
atgtggaatagaggtggtggccaaaggcagaacataggatgtagagcagtcattaatacatgtaattgtacatgtcagccatg

SEQ ID NO: 195129 - DNA, 80 bp, Homo sapiens
ggtggtggccaaaggcagaacataggatgtagagcagtcattaatacatgtaattgtacatgtcagccatggagcttttt

SEQ ID NO: 195130 - DNA, 80 bp, Homo sapiens
aaaggcagaacataggatgtagagcagtcattaatacatgtaattgtacatgtcagccatggagcttttttcatcctggg

SEQ ID NO: 195131 - DNA, 80 bp, Homo sapiens
taggatgtagagcagtcattaatacatgtaattgtacatgtcagccatggagcttttttcatcctggggtacactgttta

SEQ ID NO: 195132 - DNA, 77 bp, Homo sapiens
agcagtcattaatacatgtaattgtacatgtcagccatggagcttttttcatcctggggtacactgtttaaaatgat

SEQ ID NO: 195133 - DNA, 77 bp, Homo sapiens
tgtaattgtacatgtcagccatggagcttttttcatcctggggtacactgtttaaaatgattgtgactagagaagaa

SEQ ID NO: 195134 - DNA, 69 bp, Homo sapiens
atggagcttttttcatcctggggtacactgtttaaaatgattgtgactagagaagaaggggtcctaaaa

SEQ ID NO: 195135 - DNA, 71 bp, Homo sapiens
tttcatcctggggtacactgtttaaaatgattgtgactagagaagaaggggtcctaaaatctgcagtattt

SEQ ID NO: 195136 - DNA, 73 bp, Homo sapiens
ttaaaatgattgtgactagagaagaaggggtcctaaaatctgcagtattttcactttataggttgtatggctc

SEQ ID NO: 195137 - DNA, 71 bp, Homo sapiens
actagagaagaaggggtcctaaaatctgcagtattttcactttataggttgtatggctcggtgtaattaca

SEQ ID NO: 195138 - DNA, 70 bp, Homo sapiens
agaagaaggggtcctaaaatctgcagtattttcactttataggttgtatggctcggtgtaattacacaaa

SEQ ID NO: 195139 - DNA, 70 bp, Homo sapiens
gtcctaaaatctgcagtattttcactttataggttgtatggctcggtgtaattacacaaagccaactttt

SEQ ID NO: 195140 - DNA, 71 bp, Homo sapiens
ttcactttataggttgtatggctcggtgtaattacacaaagccaactttttataatgaaacacaggcagtt

SEQ ID NO: 195141 - DNA, 69 bp, Homo sapiens
aggttgtatggctcggtgtaattacacaaagccaactttttataatgaaacacaggcagttttaaagaa

SEQ ID NO: 195142 - DNA, 68 bp, Homo sapiens
gctcggtgtaattacacaaagccaactttttataatgaaacacaggcagttttaaagaattagggatt

SEQ ID NO: 195143 - DNA, 68 bp, Homo sapiens
gccaactttttataatgaaacacaggcagttttaaagaattagggattttaggagcattgtttttata

SEQ ID NO: 195144 - DNA, 72 bp, Homo sapiens
atgaaacacaggcagttttaaagaattagggattttaggagcattgtttttatacatatggaaaacagtgca

SEQ ID NO: 195145 - DNA, 75 bp, Homo sapiens
cacaggcagttttaaagaattagggattttaggagcattgtttttatacatatggaaaacagtgcaatgcaagca

SEQ ID NO: 195146 - DNA, 77 bp, Homo sapiens
agaattagggattttaggagcattgtttttatacatatggaaaacagtgcaatgcaagcatttgcattacactaatg

SEQ ID NO: 195147 - DNA, 78 bp, Homo sapiens
tagggattttaggagcattgtttttatacatatggaaaacagtgcaatgcaagcatttgcattacactaatgtcctaa

SEQ ID NO: 195148 - DNA, 78 bp, Homo sapiens
aggagcattgtttttatacatatggaaaacagtgcaatgcaagcatttgcattacactaatgtcctaaaatcacttta

SEQ ID NO: 195149 - DNA, 78 bp, Homo sapiens
atacatatggaaaacagtgcaatgcaagcatttgcattacactaatgtcctaaaatcactttaaactgcaaaccaata

SEQ ID NO: 195150 - DNA, 77 bp, Homo sapiens
gaaaacagtgcaatgcaagcatttgcattacactaatgtcctaaaatcactttaaactgcaaaccaatactgtacaa

SEQ ID NO: 195151 - DNA, 76 bp, Homo sapiens
agtgcaatgcaagcatttgcattacactaatgtcctaaaatcactttaaactgcaaaccaatactgtacaagaaat

SEQ ID NO: 195152 - DNA, 74 bp, Homo sapiens
gcatttgcattacactaatgtcctaaaatcactttaaactgcaaaccaatactgtacaagaaatttgaagaatc

SEQ ID NO: 195153 - DNA, 71 bp, Homo sapiens
cactaatgtcctaaaatcactttaaactgcaaaccaatactgtacaagaaatttgaagaatctgtacttaa

SEQ ID NO: 195154 - DNA, 70 bp, Homo sapiens
cctaaaatcactttaaactgcaaaccaatactgtacaagaaatttgaagaatctgtacttaacatttgga

SEQ ID NO: 195155 - DNA, 72 bp, Homo sapiens
ctttaaactgcaaaccaatactgtacaagaaatttgaagaatctgtacttaacatttggaaagactcataca

SEQ ID NO: 195156 - DNA, 75 bp, Homo sapiens
ctgcaaaccaatactgtacaagaaatttgaagaatctgtacttaacatttggaaagactcatacaaaacagatca

SEQ ID NO: 195157 - DNA, 76 bp, Homo sapiens
atactgtacaagaaatttgaagaatctgtacttaacatttggaaagactcatacaaaacagatcatgttctatgaa

SEQ ID NO: 195158 - DNA, 76 bp, Homo sapiens
tttgaagaatctgtacttaacatttggaaagactcatacaaaacagatcatgttctatgaaaagaaacagtggatc

SEQ ID NO: 195159 - DNA, 78 bp, Homo sapiens
ctgtacttaacatttggaaagactcatacaaaacagatcatgttctatgaaaagaaacagtggatcttatcaacagca

SEQ ID NO: 195160 - DNA, 78 bp, Homo sapiens
aacatttggaaagactcatacaaaacagatcatgttctatgaaaagaaacagtggatcttatcaacagcaattctcaa

SEQ ID NO: 195161 - DNA, 80 bp, Homo sapiens
aagactcatacaaaacagatcatgttctatgaaaagaaacagtggatcttatcaacagcaattctcaaaatgctgcccta

SEQ ID NO: 195162 - DNA, 80 bp, Homo sapiens
aaacagatcatgttctatgaaaagaaacagtggatcttatcaacagcaattctcaaaatgctgccctagatgcctcaaat

SEQ ID NO: 195163 - DNA, 81 bp, Homo sapiens
atgttctatgaaaagaaacagtggatcttatcaacagcaattctcaaaatgctgccctagatgcctcaaattatagcgaca

SEQ ID NO: 195164 - DNA, 79 bp, Homo sapiens
aaagaaacagtggatcttatcaacagcaattctcaaaatgctgccctagatgcctcaaattatagcgacagaatcttct

SEQ ID NO: 195165 - DNA, 84 bp, Homo sapiens
tctcaaaatgctgccctagatgcctcaaattatagcgacagaatcttcttgataatggatgtgatcctcaggtaagcaacataa

SEQ ID NO: 195166 - DNA, 79 bp, Homo sapiens
ctagatgcctcaaattatagcgacagaatcttcttgataatggatgtgatcctcaggtaagcaacataaaacacatttt

SEQ ID NO: 195167 - DNA, 74 bp, Homo sapiens
caaattatagcgacagaatcttcttgataatggatgtgatcctcaggtaagcaacataaaacacattttttttt

SEQ ID NO: 195168 - DNA, 66 bp, Homo sapiens
aaaaaagtacacccattaagttttcgtcattacctggcaagcccatggggtataatttttagaaga

SEQ ID NO: 195169 - DNA, 67 bp, Homo sapiens
acccattaagttttcgtcattacctggcaagcccatggggtataatttttagaagaatacggaggaa

SEQ ID NO: 195170 - DNA, 68 bp, Homo sapiens
taagttttcgtcattacctggcaagcccatggggtataatttttagaagaatacggaggaaaatctgt

SEQ ID NO: 195171 - DNA, 68 bp, Homo sapiens
attacctggcaagcccatggggtataatttttagaagaatacggaggaaaatctgttaacagtaatgt

SEQ ID NO: 195172 - DNA, 68 bp, Homo sapiens
aagcccatggggtataatttttagaagaatacggaggaaaatctgttaacagtaatgttgggtagcaa

SEQ ID NO: 195173 - DNA, 68 bp, Homo sapiens
gggtataatttttagaagaatacggaggaaaatctgttaacagtaatgttgggtagcaatttggaatg

SEQ ID NO: 195174 - DNA, 71 bp, Homo sapiens
agaagaatacggaggaaaatctgttaacagtaatgttgggtagcaatttggaatgtttactagtagacaga

SEQ ID NO: 195175 - DNA, 70 bp, Homo sapiens
aatacggaggaaaatctgttaacagtaatgttgggtagcaatttggaatgtttactagtagacagaactc

SEQ ID NO: 195176 - DNA, 70 bp, Homo sapiens
ctgttaacagtaatgttgggtagcaatttggaatgtttactagtagacagaactcctaattaggtaaatg

SEQ ID NO: 195177 - DNA, 72 bp, Homo sapiens
cagtaatgttgggtagcaatttggaatgtttactagtagacagaactcctaattaggtaaatgtgtattaga

SEQ ID NO: 195178 - DNA, 70 bp, Homo sapiens
gggtagcaatttggaatgtttactagtagacagaactcctaattaggtaaatgtgtattagaaatgacct

SEQ ID NO: 195179 - DNA, 72 bp, Homo sapiens
tggaatgtttactagtagacagaactcctaattaggtaaatgtgtattagaaatgaccttaaagtcttcaga

SEQ ID NO: 195180 - DNA, 70 bp, Homo sapiens
actagtagacagaactcctaattaggtaaatgtgtattagaaatgaccttaaagtcttcagagtggaagg

SEQ ID NO: 195181 - DNA, 70 bp, Homo sapiens
gacagaactcctaattaggtaaatgtgtattagaaatgaccttaaagtcttcagagtggaaggtaagtaa

SEQ ID NO: 195182 - DNA, 71 bp, Homo sapiens
taggtaaatgtgtattagaaatgaccttaaagtcttcagagtggaaggtaagtaatttgaacatgaatact

SEQ ID NO: 195183 - DNA, 71 bp, Homo sapiens
gtgtattagaaatgaccttaaagtcttcagagtggaaggtaagtaatttgaacatgaatacttagttggta

SEQ ID NO: 195184 - DNA, 70 bp, Homo sapiens
gaaatgaccttaaagtcttcagagtggaaggtaagtaatttgaacatgaatacttagttggtaaataaca

SEQ ID NO: 195185 - DNA, 68 bp, Homo sapiens
cttaaagtcttcagagtggaaggtaagtaatttgaacatgaatacttagttggtaaataacattttaa

SEQ ID NO: 195186 - DNA, 70 bp, Homo sapiens
tcagagtggaaggtaagtaatttgaacatgaatacttagttggtaaataacattttaagaattctattta

SEQ ID NO: 195187 - DNA, 73 bp, Homo sapiens
tgaacatgaatacttagttggtaaataacattttaagaattctatttaggtttcacagactgagcattaggta

SEQ ID NO: 195188 - DNA, 70 bp, Homo sapiens
ttagttggtaaataacattttaagaattctatttaggtttcacagactgagcattaggtaaccctgtgac

SEQ ID NO: 195189 - DNA, 70 bp, Homo sapiens
aataacattttaagaattctatttaggtttcacagactgagcattaggtaaccctgtgactagcctttaa

SEQ ID NO: 195190 - DNA, 72 bp, Homo sapiens
taagaattctatttaggtttcacagactgagcattaggtaaccctgtgactagcctttaacattattatagt

SEQ ID NO: 195191 - DNA, 70 bp, Homo sapiens
atttaggtttcacagactgagcattaggtaaccctgtgactagcctttaacattattatagttaaccttc

SEQ ID NO: 195192 - DNA, 70 bp, Homo sapiens
ggtttcacagactgagcattaggtaaccctgtgactagcctttaacattattatagttaaccttcttaaa

SEQ ID NO: 195193 - DNA, 65 bp, Homo sapiens
aggtaaccctgtgactagcctttaacattattatagttaaccttcttaaaaaccaaaggtgtaca

SEQ ID NO: 195194 - DNA, 68 bp, Homo sapiens
gtgactagcctttaacattattatagttaaccttcttaaaaaccaaaggtgtacattttgacattgcc

SEQ ID NO: 195195 - DNA, 65 bp, Homo sapiens
ttatagttaaccttcttaaaaaccaaaggtgtacattttgacattgcctcccctcctcctaaaac

SEQ ID NO: 195196 - DNA, 66 bp, Homo sapiens
ttaaaaaccaaaggtgtacattttgacattgcctcccctcctcctaaaactggataaaacccagta

SEQ ID NO: 195197 - DNA, 67 bp, Homo sapiens
aaaggtgtacattttgacattgcctcccctcctcctaaaactggataaaacccagtaaagtgcaact

SEQ ID NO: 195198 - DNA, 73 bp, Homo sapiens
tacattttgacattgcctcccctcctcctaaaactggataaaacccagtaaagtgcaacttgacagtgatctc

SEQ ID NO: 195199 - DNA, 73 bp, Homo sapiens
gcctcccctcctcctaaaactggataaaacccagtaaagtgcaacttgacagtgatctctctcagattctaaa

SEQ ID NO: 195200 - DNA, 75 bp, Homo sapiens
ctcctaaaactggataaaacccagtaaagtgcaacttgacagtgatctctctcagattctaaagaggctgccaaa

SEQ ID NO: 195201 - DNA, 76 bp, Homo sapiens
aaaacccagtaaagtgcaacttgacagtgatctctctcagattctaaagaggctgccaaactcatttaagatctaa

SEQ ID NO: 195202 - DNA, 80 bp, Homo sapiens
aaagtgcaacttgacagtgatctctctcagattctaaagaggctgccaaactcatttaagatctaaaatcatctaagata

SEQ ID NO: 195203 - DNA, 82 bp, Homo sapiens
ttgacagtgatctctctcagattctaaagaggctgccaaactcatttaagatctaaaatcatctaagatactatagatacta

SEQ ID NO: 195204 - DNA, 73 bp, Homo sapiens
ggctgccaaactcatttaagatctaaaatcatctaagatactatagatactaaaaagaaattctaacaactaa

SEQ ID NO: 195205 - DNA, 68 bp, Homo sapiens
aaatcatctaagatactatagatactaaaaagaaattctaacaactaaaaattgtaattaaaaagagc

SEQ ID NO: 195206 - DNA, 68 bp, Homo sapiens
tctaagatactatagatactaaaaagaaattctaacaactaaaaattgtaattaaaaagagctaagga

SEQ ID NO: 195207 - DNA, 66 bp, Homo sapiens
ctatagatactaaaaagaaattctaacaactaaaaattgtaattaaaaagagctaaggacaactta

SEQ ID NO: 195208 - DNA, 66 bp, Homo sapiens
agaaattctaacaactaaaaattgtaattaaaaagagctaaggacaacttaaatagtatccttcta

SEQ ID NO: 195209 - DNA, 66 bp, Homo sapiens
acaactaaaaattgtaattaaaaagagctaaggacaacttaaatagtatccttctagggtctacta

SEQ ID NO: 195210 - DNA, 72 bp, Homo sapiens
attgtaattaaaaagagctaaggacaacttaaatagtatccttctagggtctactatctcactgcaggacag

SEQ ID NO: 195211 - DNA, 73 bp, Homo sapiens
aattaaaaagagctaaggacaacttaaatagtatccttctagggtctactatctcactgcaggacagtgtata

SEQ ID NO: 195212 - DNA, 77 bp, Homo sapiens
taaggacaacttaaatagtatccttctagggtctactatctcactgcaggacagtgtataccccacatctctgagaa

SEQ ID NO: 195213 - DNA, 76 bp, Homo sapiens
ttaaatagtatccttctagggtctactatctcactgcaggacagtgtataccccacatctctgagaaccctgtaaa

SEQ ID NO: 195214 - DNA, 77 bp, Homo sapiens
tatccttctagggtctactatctcactgcaggacagtgtataccccacatctctgagaaccctgtaaagccagtgtt

SEQ ID NO: 195215 - DNA, 78 bp, Homo sapiens
agggtctactatctcactgcaggacagtgtataccccacatctctgagaaccctgtaaagccagtgtttcatatgtaa

SEQ ID NO: 195216 - DNA, 76 bp, Homo sapiens
actgcaggacagtgtataccccacatctctgagaaccctgtaaagccagtgtttcatatgtaagtctcgaaaccta

SEQ ID NO: 195217 - DNA, 75 bp, Homo sapiens
agtgtataccccacatctctgagaaccctgtaaagccagtgtttcatatgtaagtctcgaaacctactgtgtcaa

SEQ ID NO: 195218 - DNA, 74 bp, Homo sapiens
tgagaaccctgtaaagccagtgtttcatatgtaagtctcgaaacctactgtgtcaagtaaatttcacttcagaa

SEQ ID NO: 195219 - DNA, 76 bp, Homo sapiens
tgtaaagccagtgtttcatatgtaagtctcgaaacctactgtgtcaagtaaatttcacttcagaagaatggattga

SEQ ID NO: 195220 - DNA, 74 bp, Homo sapiens
atatgtaagtctcgaaacctactgtgtcaagtaaatttcacttcagaagaatggattgaggtgtagctttaatc

SEQ ID NO: 195221 - DNA, 70 bp, Homo sapiens
aaacctactgtgtcaagtaaatttcacttcagaagaatggattgaggtgtagctttaatcccccttgtta

SEQ ID NO: 195222 - DNA, 68 bp, Homo sapiens
gaagaatggattgaggtgtagctttaatcccccttgttaggaatacaaggattccccccaaacgagat

SEQ ID NO: 195223 - DNA, 71 bp, Homo sapiens
atggattgaggtgtagctttaatcccccttgttaggaatacaaggattccccccaaacgagattcatatca

SEQ ID NO: 195224 - DNA, 77 bp, Homo sapiens
cccttgttaggaatacaaggattccccccaaacgagattcatatcagctgcaatatatgccttgcaaaagaatgcaa

SEQ ID NO: 195225 - DNA, 78 bp, Homo sapiens
gttaggaatacaaggattccccccaaacgagattcatatcagctgcaatatatgccttgcaaaagaatgcaagacaaa

SEQ ID NO: 195226 - DNA, 80 bp, Homo sapiens
aaggattccccccaaacgagattcatatcagctgcaatatatgccttgcaaaagaatgcaagacaaaccaatgcctctca

SEQ ID NO: 195227 - DNA, 85 bp, Homo sapiens
aacgagattcatatcagctgcaatatatgccttgcaaaagaatgcaagacaaaccaatgcctctcagatgctcaaaaccaatgta

SEQ ID NO: 195228 - DNA, 88 bp, Homo sapiens
attcatatcagctgcaatatatgccttgcaaaagaatgcaagacaaaccaatgcctctcagatgctcaaaaccaatgtagtatgcatg

SEQ ID NO: 195229 - DNA, 84 bp, Homo sapiens
caatatatgccttgcaaaagaatgcaagacaaaccaatgcctctcagatgctcaaaaccaatgtagtatgcatgtgagaaacaa

SEQ ID NO: 195230 - DNA, 84 bp, Homo sapiens
tatgccttgcaaaagaatgcaagacaaaccaatgcctctcagatgctcaaaaccaatgtagtatgcatgtgagaaacaaggaga

SEQ ID NO: 195231 - DNA, 83 bp, Homo sapiens
aatgcaagacaaaccaatgcctctcagatgctcaaaaccaatgtagtatgcatgtgagaaacaaggagacagctgctttgaat

SEQ ID NO: 195232 - DNA, 79 bp, Homo sapiens
agatgctcaaaaccaatgtagtatgcatgtgagaaacaaggagacagctgctttgaattattactgaaatcgtaaaaca

SEQ ID NO: 195233 - DNA, 80 bp, Homo sapiens
aaccaatgtagtatgcatgtgagaaacaaggagacagctgctttgaattattactgaaatcgtaaaacagcagcagtatc

SEQ ID NO: 195234 - DNA, 84 bp, Homo sapiens
tatgcatgtgagaaacaaggagacagctgctttgaattattactgaaatcgtaaaacagcagcagtatctgcagaatcaaggaa

SEQ ID NO: 195235 - DNA, 78 bp, Homo sapiens
aaacaaggagacagctgctttgaattattactgaaatcgtaaaacagcagcagtatctgcagaatcaaggaactgtta

SEQ ID NO: 195236 - DNA, 77 bp, Homo sapiens
agctgctttgaattattactgaaatcgtaaaacagcagcagtatctgcagaatcaaggaactgttacaattctgttt

SEQ ID NO: 195237 - DNA, 75 bp, Homo sapiens
taaaacagcagcagtatctgcagaatcaaggaactgttacaattctgttttttccctttccctctgtctcaccca

SEQ ID NO: 195238 - DNA, 69 bp, Homo sapiens
agaatcaaggaactgttacaattctgttttttccctttccctctgtctcacccaaaacaaggcttcatc

SEQ ID NO: 195239 - DNA, 71 bp, Homo sapiens
aactgttacaattctgttttttccctttccctctgtctcacccaaaacaaggcttcatcctactgctgtga

SEQ ID NO: 195240 - DNA, 71 bp, Homo sapiens
attctgttttttccctttccctctgtctcacccaaaacaaggcttcatcctactgctgtgatgacgggaaa

SEQ ID NO: 195241 - DNA, 73 bp, Homo sapiens
ttccctttccctctgtctcacccaaaacaaggcttcatcctactgctgtgatgacgggaaatcacatttaaaa

SEQ ID NO: 195242 - DNA, 77 bp, Homo sapiens
tctgtctcacccaaaacaaggcttcatcctactgctgtgatgacgggaaatcacatttaaaaagggctcatgttctg

SEQ ID NO: 195243 - DNA, 76 bp, Homo sapiens
caaaacaaggcttcatcctactgctgtgatgacgggaaatcacatttaaaaagggctcatgttctgtattggttga

SEQ ID NO: 195244 - DNA, 75 bp, Homo sapiens
cttcatcctactgctgtgatgacgggaaatcacatttaaaaagggctcatgttctgtattggttgacaaaattat

SEQ ID NO: 195245 - DNA, 74 bp, Homo sapiens
ctactgctgtgatgacgggaaatcacatttaaaaagggctcatgttctgtattggttgacaaaattattgtaat

SEQ ID NO: 195246 - DNA, 70 bp, Homo sapiens
gtgatgacgggaaatcacatttaaaaagggctcatgttctgtattggttgacaaaattattgtaattttt

SEQ ID NO: 195247 - DNA, 67 bp, Homo sapiens
gaaatcacatttaaaaagggctcatgttctgtattggttgacaaaattattgtaattttttgggggg

SEQ ID NO: 195248 - DNA, 66 bp, Homo sapiens
ttaaaaagggctcatgttctgtattggttgacaaaattattgtaattttttgggggggctaaggag

SEQ ID NO: 195249 - DNA, 68 bp, Homo sapiens
aaaaaaagtgattctaattttatacaccaaaacgtttcctgcagcaagttaccctgccttctgtgaaa

SEQ ID NO: 195250 - DNA, 68 bp, Homo sapiens
attctaattttatacaccaaaacgtttcctgcagcaagttaccctgccttctgtgaaaggtaaaccta

SEQ ID NO: 195251 - DNA, 68 bp, Homo sapiens
ttttatacaccaaaacgtttcctgcagcaagttaccctgccttctgtgaaaggtaaacctaagacaaa

SEQ ID NO: 195252 - DNA, 70 bp, Homo sapiens
aaaacgtttcctgcagcaagttaccctgccttctgtgaaaggtaaacctaagacaaacatgtgaagtgaa

SEQ ID NO: 195253 - DNA, 75 bp, Homo sapiens
gcagcaagttaccctgccttctgtgaaaggtaaacctaagacaaacatgtgaagtgaagatcccataagactctg

SEQ ID NO: 195254 - DNA, 72 bp, Homo sapiens
aagttaccctgccttctgtgaaaggtaaacctaagacaaacatgtgaagtgaagatcccataagactctggc

SEQ ID NO: 195255 - DNA, 76 bp, Homo sapiens
ttctgtgaaaggtaaacctaagacaaacatgtgaagtgaagatcccataagactctggctgatggagggtctcagt

SEQ ID NO: 195256 - DNA, 76 bp, Homo sapiens
aaaggtaaacctaagacaaacatgtgaagtgaagatcccataagactctggctgatggagggtctcagttcatcca

SEQ ID NO: 195257 - DNA, 80 bp, Homo sapiens
acaaacatgtgaagtgaagatcccataagactctggctgatggagggtctcagttcatccacatttggggagaatcaatc

SEQ ID NO: 195258 - DNA, 79 bp, Homo sapiens
tgaagtgaagatcccataagactctggctgatggagggtctcagttcatccacatttggggagaatcaatctaaataat

SEQ ID NO: 195259 - DNA, 75 bp, Homo sapiens
aagatcccataagactctggctgatggagggtctcagttcatccacatttggggagaatcaatctaaataatttt

SEQ ID NO: 195260 - DNA, 74 bp, Homo sapiens
taagactctggctgatggagggtctcagttcatccacatttggggagaatcaatctaaataatttttaaacatt

SEQ ID NO: 195261 - DNA, 70 bp, Homo sapiens
aaaaaaaaaggcgggggatggggagcttctcaacaattcatggaaagtgtcctggaaatggtaatgctca

SEQ ID NO: 195262 - DNA, 76 bp, Homo sapiens
gcgggggatggggagcttctcaacaattcatggaaagtgtcctggaaatggtaatgctcaagctgagcttattaaa

SEQ ID NO: 195263 - DNA, 80 bp, Homo sapiens
ggatggggagcttctcaacaattcatggaaagtgtcctggaaatggtaatgctcaagctgagcttattaaagcattctga

SEQ ID NO: 195264 - DNA, 79 bp, Homo sapiens
gggagcttctcaacaattcatggaaagtgtcctggaaatggtaatgctcaagctgagcttattaaagcattctgaacag

SEQ ID NO: 195265 - DNA, 78 bp, Homo sapiens
tcaacaattcatggaaagtgtcctggaaatggtaatgctcaagctgagcttattaaagcattctgaacagtattttta

SEQ ID NO: 195266 - DNA, 76 bp, Homo sapiens
aacaattcatggaaagtgtcctggaaatggtaatgctcaagctgagcttattaaagcattctgaacagtattttta

SEQ ID NO: 195267 - DNA, 75 bp, Homo sapiens
attcatggaaagtgtcctggaaatggtaatgctcaagctgagcttattaaagcattctgaacagtatttttaaaa

SEQ ID NO: 195268 - DNA, 75 bp, Homo sapiens
tggaaagtgtcctggaaatggtaatgctcaagctgagcttattaaagcattctgaacagtatttttaaaaaatca

SEQ ID NO: 195269 - DNA, 71 bp, Homo sapiens
atttttaaaaaatcaagtatcaaagaggatagaatttgaagtgaaaaaacatttctgtgtgcagtgttcta

SEQ ID NO: 195270 - DNA, 78 bp, Homo sapiens
aatcaagtatcaaagaggatagaatttgaagtgaaaaaacatttctgtgtgcagtgttctatctgcaaactgcacatt

SEQ ID NO: 195271 - DNA, 80 bp, Homo sapiens
tatcaaagaggatagaatttgaagtgaaaaaacatttctgtgtgcagtgttctatctgcaaactgcacatttctacagaa

SEQ ID NO: 195272 - DNA, 84 bp, Homo sapiens
tagaatttgaagtgaaaaaacatttctgtgtgcagtgttctatctgcaaactgcacatttctacagaatgatgagctgtatcaa

SEQ ID NO: 195273 - DNA, 83 bp, Homo sapiens
aagtgaaaaaacatttctgtgtgcagtgttctatctgcaaactgcacatttctacagaatgatgagctgtatcaaataccaca

SEQ ID NO: 195274 - DNA, 83 bp, Homo sapiens
atttctgtgtgcagtgttctatctgcaaactgcacatttctacagaatgatgagctgtatcaaataccacactggaacaaaaa

SEQ ID NO: 195275 - DNA, 81 bp, Homo sapiens
gttctatctgcaaactgcacatttctacagaatgatgagctgtatcaaataccacactggaacaaaaaatatatagtctaa

SEQ ID NO: 195276 - DNA, 78 bp, Homo sapiens
actgcacatttctacagaatgatgagctgtatcaaataccacactggaacaaaaaatatatagtctaaagtaaactca

SEQ ID NO: 195277 - DNA, 76 bp, Homo sapiens
ctacagaatgatgagctgtatcaaataccacactggaacaaaaaatatatagtctaaagtaaactcaaatgaggga

SEQ ID NO: 195278 - DNA, 75 bp, Homo sapiens
gatgagctgtatcaaataccacactggaacaaaaaatatatagtctaaagtaaactcaaatgagggaaaatatga

SEQ ID NO: 195279 - DNA, 70 bp, Homo sapiens
caaataccacactggaacaaaaaatatatagtctaaagtaaactcaaatgagggaaaatatgacagaacc

SEQ ID NO: 195280 - DNA, 70 bp, Homo sapiens
accacactggaacaaaaaatatatagtctaaagtaaactcaaatgagggaaaatatgacagaacccaaga

SEQ ID NO: 195281 - DNA, 70 bp, Homo sapiens
ccacactggaacaaaaaatatatagtctaaagtaaactcaaatgagggaaaatatgacagaacccaagag

SEQ ID NO: 195282 - DNA, 70 bp, Homo sapiens
ctggaacaaaaaatatatagtctaaagtaaactcaaatgagggaaaatatgacagaacccaagaggaaga

SEQ ID NO: 195283 - DNA, 67 bp, Homo sapiens
aaaaatatatagtctaaagtaaactcaaatgagggaaaatatgacagaacccaagaggaagaaactt

SEQ ID NO: 195284 - DNA, 68 bp, Homo sapiens
aagtaaactcaaatgagggaaaatatgacagaacccaagaggaagaaactttaatatcttgggtgtcc

SEQ ID NO: 195285 - DNA, 70 bp, Homo sapiens
taaactcaaatgagggaaaatatgacagaacccaagaggaagaaactttaatatcttgggtgtcctgaaa

SEQ ID NO: 195286 - DNA, 70 bp, Homo sapiens
actcaaatgagggaaaatatgacagaacccaagaggaagaaactttaatatcttgggtgtcctgaaaata

SEQ ID NO: 195287 - DNA, 69 bp, Homo sapiens
agggaaaatatgacagaacccaagaggaagaaactttaatatcttgggtgtcctgaaaataattctgaa

SEQ ID NO: 195288 - DNA, 68 bp, Homo sapiens
tgacagaacccaagaggaagaaactttaatatcttgggtgtcctgaaaataattctgaaaaaacctcc

SEQ ID NO: 195289 - DNA, 66 bp, Homo sapiens
ggaagaaactttaatatcttgggtgtcctgaaaataattctgaaaaaacctccctttttatcacca

SEQ ID NO: 195290 - DNA, 70 bp, Homo sapiens
cttgggtgtcctgaaaataattctgaaaaaacctccctttttatcaccatctactctgattcatttagga

SEQ ID NO: 195291 - DNA, 71 bp, Homo sapiens
aattctgaaaaaacctccctttttatcaccatctactctgattcatttaggaccaggagggattgtggcag

SEQ ID NO: 195292 - DNA, 77 bp, Homo sapiens
aacctccctttttatcaccatctactctgattcatttaggaccaggagggattgtggcaggattctgcactgatgaa

SEQ ID NO: 195293 - DNA, 80 bp, Homo sapiens
ttttatcaccatctactctgattcatttaggaccaggagggattgtggcaggattctgcactgatgaagttggaaatgcc

SEQ ID NO: 195294 - DNA, 83 bp, Homo sapiens
atctactctgattcatttaggaccaggagggattgtggcaggattctgcactgatgaagttggaaatgcctgcatattcatcc

SEQ ID NO: 195295 - DNA, 82 bp, Homo sapiens
attcatttaggaccaggagggattgtggcaggattctgcactgatgaagttggaaatgcctgcatattcatccctggctgga

SEQ ID NO: 195296 - DNA, 80 bp, Homo sapiens
accaggagggattgtggcaggattctgcactgatgaagttggaaatgcctgcatattcatccctggctggaatggtcccc

SEQ ID NO: 195297 - DNA, 81 bp, Homo sapiens
attgtggcaggattctgcactgatgaagttggaaatgcctgcatattcatccctggctggaatggtcccccagattgggcg

SEQ ID NO: 195298 - DNA, 79 bp, Homo sapiens
ttctgcactgatgaagttggaaatgcctgcatattcatccctggctggaatggtcccccagattgggcgggaattacta

SEQ ID NO: 195299 - DNA, 76 bp, Homo sapiens
tgaagttggaaatgcctgcatattcatccctggctggaatggtcccccagattgggcgggaattactacagattgt

SEQ ID NO: 195300 - DNA, 75 bp, Homo sapiens
aaatgcctgcatattcatccctggctggaatggtcccccagattgggcgggaattactacagattgttgtgttgt

SEQ ID NO: 195301 - DNA, 73 bp, Homo sapiens
atattcatccctggctggaatggtcccccagattgggcgggaattactacagattgttgtgttgttcctgaaa

SEQ ID NO: 195302 - DNA, 71 bp, Homo sapiens
cctggctggaatggtcccccagattgggcgggaattactacagattgttgtgttgttcctgaaattcctac

SEQ ID NO: 195303 - DNA, 70 bp, Homo sapiens
aatggtcccccagattgggcgggaattactacagattgttgtgttgttcctgaaattcctacccactgta

SEQ ID NO: 195304 - DNA, 71 bp, Homo sapiens
ccagattgggcgggaattactacagattgttgtgttgttcctgaaattcctacccactgtactggataccc

SEQ ID NO: 195305 - DNA, 68 bp, Homo sapiens
cgggaattactacagattgttgtgttgttcctgaaattcctacccactgtactggataccccgccccc

SEQ ID NO: 195306 - DNA, 73 bp, Homo sapiens
attgttgtgttgttcctgaaattcctacccactgtactggataccccgcccccgccacagcattatactgaca

SEQ ID NO: 195307 - DNA, 72 bp, Homo sapiens
ttgttcctgaaattcctacccactgtactggataccccgcccccgccacagcattatactgacaaacgtgag

SEQ ID NO: 195308 - DNA, 79 bp, Homo sapiens
tacccactgtactggataccccgcccccgccacagcattatactgacaaacgtgaggcattccatatgatgataatggc

SEQ ID NO: 195309 - DNA, 79 bp, Homo sapiens
tggataccccgcccccgccacagcattatactgacaaacgtgaggcattccatatgatgataatggcccaggaaatgaa

SEQ ID NO: 195310 - DNA, 80 bp, Homo sapiens
cccgccacagcattatactgacaaacgtgaggcattccatatgatgataatggcccaggaaatgaagggagtgagagtcc

SEQ ID NO: 195311 - DNA, 81 bp, Homo sapiens
agcattatactgacaaacgtgaggcattccatatgatgataatggcccaggaaatgaagggagtgagagtccttgtggcaa

SEQ ID NO: 195312 - DNA, 79 bp, Homo sapiens
tactgacaaacgtgaggcattccatatgatgataatggcccaggaaatgaagggagtgagagtccttgtggcaaggaag

SEQ ID NO: 195313 - DNA, 79 bp, Homo sapiens
aggcattccatatgatgataatggcccaggaaatgaagggagtgagagtccttgtggcaaggaagttgggacagctcca

SEQ ID NO: 195314 - DNA, 76 bp, Homo sapiens
atatgatgataatggcccaggaaatgaagggagtgagagtccttgtggcaaggaagttgggacagctccacggatt

SEQ ID NO: 195315 - DNA, 73 bp, Homo sapiens
ataatggcccaggaaatgaagggagtgagagtccttgtggcaaggaagttgggacagctccacggatttggga

SEQ ID NO: 195316 - DNA, 73 bp, Homo sapiens
aaatgaagggagtgagagtccttgtggcaaggaagttgggacagctccacggatttgggacagagaagaaatc

SEQ ID NO: 195317 - DNA, 77 bp, Homo sapiens
agtgagagtccttgtggcaaggaagttgggacagctccacggatttgggacagagaagaaatccatgttgatgtgta

SEQ ID NO: 195318 - DNA, 76 bp, Homo sapiens
gaagttgggacagctccacggatttgggacagagaagaaatccatgttgatgtgtagcccatagtagacggagtat

SEQ ID NO: 195319 - DNA, 76 bp, Homo sapiens
acagctccacggatttgggacagagaagaaatccatgttgatgtgtagcccatagtagacggagtattctaagaaa

SEQ ID NO: 195320 - DNA, 73 bp, Homo sapiens
acggatttgggacagagaagaaatccatgttgatgtgtagcccatagtagacggagtattctaagaaaaacaa

SEQ ID NO: 195321 - DNA, 66 bp, Homo sapiens
ggttttagttcttgtaaacaaagtgaattgggtataaacaacttacttcagatactttattccagt

SEQ ID NO: 195322 - DNA, 69 bp, Homo sapiens
gttcttgtaaacaaagtgaattgggtataaacaacttacttcagatactttattccagttttctgtctc

SEQ ID NO: 195323 - DNA, 70 bp, Homo sapiens
aagtgaattgggtataaacaacttacttcagatactttattccagttttctgtctctagtttgtgttgac

SEQ ID NO: 195324 - DNA, 69 bp, Homo sapiens
aattgggtataaacaacttacttcagatactttattccagttttctgtctctagtttgtgttgactttg

SEQ ID NO: 195325 - DNA, 68 bp, Homo sapiens
aacaacttacttcagatactttattccagttttctgtctctagtttgtgttgactttgtttaagttgg

SEQ ID NO: 195326 - DNA, 69 bp, Homo sapiens
tcagatactttattccagttttctgtctctagtttgtgttgactttgtttaagttggtttaaacttggc

SEQ ID NO: 195327 - DNA, 68 bp, Homo sapiens
tccagttttctgtctctagtttgtgttgactttgtttaagttggtttaaacttggcttaataagagaa

SEQ ID NO: 195328 - DNA, 69 bp, Homo sapiens
tgtctctagtttgtgttgactttgtttaagttggtttaaacttggcttaataagagaatttcctactgc

SEQ ID NO: 195329 - DNA, 67 bp, Homo sapiens
ctagtttgtgttgactttgtttaagttggtttaaacttggcttaataagagaatttcctactgcttc

SEQ ID NO: 195330 - DNA, 69 bp, Homo sapiens
tgactttgtttaagttggtttaaacttggcttaataagagaatttcctactgcttcctttgtccagtca

SEQ ID NO: 195331 - DNA, 70 bp, Homo sapiens
ttaagttggtttaaacttggcttaataagagaatttcctactgcttcctttgtccagtcatccaccagct

SEQ ID NO: 195332 - DNA, 75 bp, Homo sapiens
ttaaacttggcttaataagagaatttcctactgcttcctttgtccagtcatccaccagcttgtgtaagtcatctg

SEQ ID NO: 195333 - DNA, 76 bp, Homo sapiens
taataagagaatttcctactgcttcctttgtccagtcatccaccagcttgtgtaagtcatctgtgaacatcccttt

SEQ ID NO: 195334 - DNA, 74 bp, Homo sapiens
aatttcctactgcttcctttgtccagtcatccaccagcttgtgtaagtcatctgtgaacatcccttttttactg

SEQ ID NO: 195335 - DNA, 76 bp, Homo sapiens
cttcctttgtccagtcatccaccagcttgtgtaagtcatctgtgaacatcccttttttactggctggagactgttg

SEQ ID NO: 195336 - DNA, 83 bp, Homo sapiens
agtcatccaccagcttgtgtaagtcatctgtgaacatcccttttttactggctggagactgttggcatgatgctgcattactc

SEQ ID NO: 195337 - DNA, 83 bp, Homo sapiens
accagcttgtgtaagtcatctgtgaacatcccttttttactggctggagactgttggcatgatgctgcattactctccacaca

SEQ ID NO: 195338 - DNA, 85 bp, Homo sapiens
taagtcatctgtgaacatcccttttttactggctggagactgttggcatgatgctgcattactctccacacacagtggatctata

SEQ ID NO: 195339 - DNA, 82 bp, Homo sapiens
tgaacatcccttttttactggctggagactgttggcatgatgctgcattactctccacacacagtggatctataagacaaaa

SEQ ID NO: 195340 - DNA, 79 bp, Homo sapiens
atcccttttttactggctggagactgttggcatgatgctgcattactctccacacacagtggatctataagacaaaaaa

SEQ ID NO: 195341 - DNA, 65 bp, Homo sapiens
aaaaattaaaagtaaagaagcaaaagaaatacttactttccaactcatttataaggcagcttttc

SEQ ID NO: 195342 - DNA, 70 bp, Homo sapiens
agtaaagaagcaaaagaaatacttactttccaactcatttataaggcagcttttccctgatatcaaacca

SEQ ID NO: 195343 - DNA, 70 bp, Homo sapiens
agcaaaagaaatacttactttccaactcatttataaggcagcttttccctgatatcaaaccagaaaaaga

SEQ ID NO: 195344 - DNA, 72 bp, Homo sapiens
gaaatacttactttccaactcatttataaggcagcttttccctgatatcaaaccagaaaaagatagtatcaa

SEQ ID NO: 195345 - DNA, 71 bp, Homo sapiens
ctttccaactcatttataaggcagcttttccctgatatcaaaccagaaaaagatagtatcaaaattttcaa

SEQ ID NO: 195346 - DNA, 70 bp, Homo sapiens
catttataaggcagcttttccctgatatcaaaccagaaaaagatagtatcaaaattttcaaaatataaaa

SEQ ID NO: 195347 - DNA, 71 bp, Homo sapiens
gcagcttttccctgatatcaaaccagaaaaagatagtatcaaaattttcaaaatataaaacaaaaagatga

SEQ ID NO: 195348 - DNA, 73 bp, Homo sapiens
tttttaaaaattacttttatgactgatttacctgtagcaactatgccattgtccacatgtgtcaaggactggg

SEQ ID NO: 195349 - DNA, 76 bp, Homo sapiens
attacttttatgactgatttacctgtagcaactatgccattgtccacatgtgtcaaggactgggggcggcttcgaa

SEQ ID NO: 195350 - DNA, 77 bp, Homo sapiens
tatgactgatttacctgtagcaactatgccattgtccacatgtgtcaaggactgggggcggcttcgaagtttgcttt

SEQ ID NO: 195351 - DNA, 74 bp, Homo sapiens
atttacctgtagcaactatgccattgtccacatgtgtcaaggactgggggcggcttcgaagtttgcttttgaaa

SEQ ID NO: 195352 - DNA, 74 bp, Homo sapiens
aactatgccattgtccacatgtgtcaaggactgggggcggcttcgaagtttgcttttgaaagatcttggtcgac

SEQ ID NO: 195353 - DNA, 76 bp, Homo sapiens
attgtccacatgtgtcaaggactgggggcggcttcgaagtttgcttttgaaagatcttggtcgacgtggtgatgca

SEQ ID NO: 195354 - DNA, 75 bp, Homo sapiens
tgtgtcaaggactgggggcggcttcgaagtttgcttttgaaagatcttggtcgacgtggtgatgcaggtggcaaa

SEQ ID NO: 195355 - DNA, 75 bp, Homo sapiens
tgggggcggcttcgaagtttgcttttgaaagatcttggtcgacgtggtgatgcaggtggcaaaggaatctcagta

SEQ ID NO: 195356 - DNA, 74 bp, Homo sapiens
ttcgaagtttgcttttgaaagatcttggtcgacgtggtgatgcaggtggcaaaggaatctcagtagattgggtt

SEQ ID NO: 195357 - DNA, 75 bp, Homo sapiens
cttttgaaagatcttggtcgacgtggtgatgcaggtggcaaaggaatctcagtagattgggttttgctatcttta

SEQ ID NO: 195358 - DNA, 75 bp, Homo sapiens
aaagatcttggtcgacgtggtgatgcaggtggcaaaggaatctcagtagattgggttttgctatctttaattgac

SEQ ID NO: 195359 - DNA, 75 bp, Homo sapiens
acgtggtgatgcaggtggcaaaggaatctcagtagattgggttttgctatctttaattgaccgaaggcgttcata

SEQ ID NO: 195360 - DNA, 78 bp, Homo sapiens
atgcaggtggcaaaggaatctcagtagattgggttttgctatctttaattgaccgaaggcgttcatagagctcctgca

SEQ ID NO: 195361 - DNA, 75 bp, Homo sapiens
aaggaatctcagtagattgggttttgctatctttaattgaccgaaggcgttcatagagctcctgcagctccttat

SEQ ID NO: 195362 - DNA, 78 bp, Homo sapiens
atctcagtagattgggttttgctatctttaattgaccgaaggcgttcatagagctcctgcagctccttattctgctgg

SEQ ID NO: 195363 - DNA, 76 bp, Homo sapiens
gttttgctatctttaattgaccgaaggcgttcatagagctcctgcagctccttattctgctgggtttgaagattta

SEQ ID NO: 195364 - DNA, 76 bp, Homo sapiens
tatctttaattgaccgaaggcgttcatagagctcctgcagctccttattctgctgggtttgaagatttaccacctc

SEQ ID NO: 195365 - DNA, 77 bp, Homo sapiens
attgaccgaaggcgttcatagagctcctgcagctccttattctgctgggtttgaagatttaccacctcctgaatgtg

SEQ ID NO: 195366 - DNA, 83 bp, Homo sapiens
ttcatagagctcctgcagctccttattctgctgggtttgaagatttaccacctcctgaatgtgtctgaatgaaaatcatgcaa

SEQ ID NO: 195367 - DNA, 76 bp, Homo sapiens
tccttattctgctgggtttgaagatttaccacctcctgaatgtgtctgaatgaaaatcatgcaaaaagcattttaa

SEQ ID NO: 195368 - DNA, 69 bp, Homo sapiens
ctataaaacctagggcaaccagatttgtgacaaaagagaaacagtccttacttttctcgtaatctttga

SEQ ID NO: 195369 - DNA, 71 bp, Homo sapiens
caaccagatttgtgacaaaagagaaacagtccttacttttctcgtaatctttgaagctccaccttcaagtc

SEQ ID NO: 195370 - DNA, 72 bp, Homo sapiens
agatttgtgacaaaagagaaacagtccttacttttctcgtaatctttgaagctccaccttcaagtcctcatc

SEQ ID NO: 195371 - DNA, 70 bp, Homo sapiens
aaaagagaaacagtccttacttttctcgtaatctttgaagctccaccttcaagtcctcatcctctatttc

SEQ ID NO: 195372 - DNA, 78 bp, Homo sapiens
acagtccttacttttctcgtaatctttgaagctccaccttcaagtcctcatcctctatttctgattcatcatcactgc

SEQ ID NO: 195373 - DNA, 80 bp, Homo sapiens
ttttctcgtaatctttgaagctccaccttcaagtcctcatcctctatttctgattcatcatcactgctcattggggaaga

SEQ ID NO: 195374 - DNA, 82 bp, Homo sapiens
atctttgaagctccaccttcaagtcctcatcctctatttctgattcatcatcactgctcattggggaagatggcgaatagaa

SEQ ID NO: 195375 - DNA, 82 bp, Homo sapiens
accttcaagtcctcatcctctatttctgattcatcatcactgctcattggggaagatggcgaatagaagagtgaactctgtg

SEQ ID NO: 195376 - DNA, 84 bp, Homo sapiens
tatttctgattcatcatcactgctcattggggaagatggcgaatagaagagtgaactctgtgtttgagcataagcttgttcttc

SEQ ID NO: 195377 - DNA, 82 bp, Homo sapiens
attcatcatcactgctcattggggaagatggcgaatagaagagtgaactctgtgtttgagcataagcttgttcttcgtggtg

SEQ ID NO: 195378 - DNA, 78 bp, Homo sapiens
actgctcattggggaagatggcgaatagaagagtgaactctgtgtttgagcataagcttgttcttcgtggtgtggtaa

SEQ ID NO: 195379 - DNA, 79 bp, Homo sapiens
ggaagatggcgaatagaagagtgaactctgtgtttgagcataagcttgttcttcgtggtgtggtaagcactgattactc

SEQ ID NO: 195380 - DNA, 80 bp, Homo sapiens
atggcgaatagaagagtgaactctgtgtttgagcataagcttgttcttcgtggtgtggtaagcactgattactctctgga

SEQ ID NO: 195381 - DNA, 77 bp, Homo sapiens
aagagtgaactctgtgtttgagcataagcttgttcttcgtggtgtggtaagcactgattactctctggaccagtctt

SEQ ID NO: 195382 - DNA, 79 bp, Homo sapiens
tctgtgtttgagcataagcttgttcttcgtggtgtggtaagcactgattactctctggaccagtctttgccactgactt

SEQ ID NO: 195383 - DNA, 79 bp, Homo sapiens
agcataagcttgttcttcgtggtgtggtaagcactgattactctctggaccagtctttgccactgactttccactgcca

SEQ ID NO: 195384 - DNA, 79 bp, Homo sapiens
ttgttcttcgtggtgtggtaagcactgattactctctggaccagtctttgccactgactttccactgccagcaagactg

SEQ ID NO: 195385 - DNA, 81 bp, Homo sapiens
tgtggtaagcactgattactctctggaccagtctttgccactgactttccactgccagcaagactggctgaaaattcacta

SEQ ID NO: 195386 - DNA, 81 bp, Homo sapiens
actgattactctctggaccagtctttgccactgactttccactgccagcaagactggctgaaaattcactatcagagctag

SEQ ID NO: 195387 - DNA, 80 bp, Homo sapiens
actctctggaccagtctttgccactgactttccactgccagcaagactggctgaaaattcactatcagagctaggctgtt

SEQ ID NO: 195388 - DNA, 83 bp, Homo sapiens
tctttgccactgactttccactgccagcaagactggctgaaaattcactatcagagctaggctgtttcccagcagtcaatatc

SEQ ID NO: 195389 - DNA, 83 bp, Homo sapiens
actgactttccactgccagcaagactggctgaaaattcactatcagagctaggctgtttcccagcagtcaatatctctctctc

SEQ ID NO: 195390 - DNA, 83 bp, Homo sapiens
tgccagcaagactggctgaaaattcactatcagagctaggctgtttcccagcagtcaatatctctctctctttaagcaacagt

SEQ ID NO: 195391 - DNA, 81 bp, Homo sapiens
aagactggctgaaaattcactatcagagctaggctgtttcccagcagtcaatatctctctctctttaagcaacagttcaga

SEQ ID NO: 195392 - DNA, 84 bp, Homo sapiens
actatcagagctaggctgtttcccagcagtcaatatctctctctctttaagcaacagttcagatccagactgcatgctacttcc

SEQ ID NO: 195393 - DNA, 82 bp, Homo sapiens
ctgtttcccagcagtcaatatctctctctctttaagcaacagttcagatccagactgcatgctacttcctgtggctgaagtt

SEQ ID NO: 195394 - DNA, 82 bp, Homo sapiens
agcagtcaatatctctctctctttaagcaacagttcagatccagactgcatgctacttcctgtggctgaagtttcttcaaat

SEQ ID NO: 195395 - DNA, 78 bp, Homo sapiens
atctctctctctttaagcaacagttcagatccagactgcatgctacttcctgtggctgaagtttcttcaaattccttt

SEQ ID NO: 195396 - DNA, 77 bp, Homo sapiens
ctctctttaagcaacagttcagatccagactgcatgctacttcctgtggctgaagtttcttcaaattccttttctgg

SEQ ID NO: 195397 - DNA, 78 bp, Homo sapiens
acagttcagatccagactgcatgctacttcctgtggctgaagtttcttcaaattccttttctggggtcactgaagata

SEQ ID NO: 195398 - DNA, 80 bp, Homo sapiens
atccagactgcatgctacttcctgtggctgaagtttcttcaaattccttttctggggtcactgaagatacatcagtctca

SEQ ID NO: 195399 - DNA, 79 bp, Homo sapiens
atgctacttcctgtggctgaagtttcttcaaattccttttctggggtcactgaagatacatcagtctcacaagctgcgc

SEQ ID NO: 195400 - DNA, 76 bp, Homo sapiens
aattccttttctggggtcactgaagatacatcagtctcacaagctgcgctgaaagataagaagttgtcaccttgtt

SEQ ID NO: 195401 - DNA, 77 bp, Homo sapiens
tggggtcactgaagatacatcagtctcacaagctgcgctgaaagataagaagttgtcaccttgtttgggaactcctt

SEQ ID NO: 195402 - DNA, 75 bp, Homo sapiens
actgaagatacatcagtctcacaagctgcgctgaaagataagaagttgtcaccttgtttgggaactcctttattt

SEQ ID NO: 195403 - DNA, 74 bp, Homo sapiens
acatcagtctcacaagctgcgctgaaagataagaagttgtcaccttgtttgggaactcctttattttctttaca

SEQ ID NO: 195404 - DNA, 69 bp, Homo sapiens
acaagctgcgctgaaagataagaagttgtcaccttgtttgggaactcctttattttctttacaggtttc

SEQ ID NO: 195405 - DNA, 68 bp, Homo sapiens
tgaaagataagaagttgtcaccttgtttgggaactcctttattttctttacaggtttcctgaagagct

SEQ ID NO: 195406 - DNA, 66 bp, Homo sapiens
aagttgtcaccttgtttgggaactcctttattttctttacaggtttcctgaagagcttgtaacttc

SEQ ID NO: 195407 - DNA, 68 bp, Homo sapiens
caccttgtttgggaactcctttattttctttacaggtttcctgaagagcttgtaacttctcataagaa

SEQ ID NO: 195408 - DNA, 66 bp, Homo sapiens
gggaactcctttattttctttacaggtttcctgaagagcttgtaacttctcataagaaaacgaagt

SEQ ID NO: 195409 - DNA, 70 bp, Homo sapiens
ttctttacaggtttcctgaagagcttgtaacttctcataagaaaacgaagtttttggattttgtgtggca

SEQ ID NO: 195410 - DNA, 69 bp, Homo sapiens
gtttcctgaagagcttgtaacttctcataagaaaacgaagtttttggattttgtgtggcaggttctatt

SEQ ID NO: 195411 - DNA, 70 bp, Homo sapiens
gaagagcttgtaacttctcataagaaaacgaagtttttggattttgtgtggcaggttctatttctaccaa

SEQ ID NO: 195412 - DNA, 70 bp, Homo sapiens
tgtaacttctcataagaaaacgaagtttttggattttgtgtggcaggttctatttctaccaactgagact

SEQ ID NO: 195413 - DNA, 69 bp, Homo sapiens
cataagaaaacgaagtttttggattttgtgtggcaggttctatttctaccaactgagactttgctgttt

SEQ ID NO: 195414 - DNA, 71 bp, Homo sapiens
tttttggattttgtgtggcaggttctatttctaccaactgagactttgctgttttaataaaggcttcttca

SEQ ID NO: 195415 - DNA, 71 bp, Homo sapiens
aggttctatttctaccaactgagactttgctgttttaataaaggcttcttcactagaatggtttgtctcac

SEQ ID NO: 195416 - DNA, 76 bp, Homo sapiens
agactttgctgttttaataaaggcttcttcactagaatggtttgtctcactgaacactgatatgtgttctattcca

SEQ ID NO: 195417 - DNA, 76 bp, Homo sapiens
gttttaataaaggcttcttcactagaatggtttgtctcactgaacactgatatgtgttctattccaaaagatgtca

SEQ ID NO: 195418 - DNA, 75 bp, Homo sapiens
aataaaggcttcttcactagaatggtttgtctcactgaacactgatatgtgttctattccaaaagatgtcatttt

SEQ ID NO: 195419 - DNA, 81 bp, Homo sapiens
actagaatggtttgtctcactgaacactgatatgtgttctattccaaaagatgtcatttttgctgactgctgctgaggaat

SEQ ID NO: 195420 - DNA, 81 bp, Homo sapiens
aatggtttgtctcactgaacactgatatgtgttctattccaaaagatgtcatttttgctgactgctgctgaggaattgtaa

SEQ ID NO: 195421 - DNA, 83 bp, Homo sapiens
tgaacactgatatgtgttctattccaaaagatgtcatttttgctgactgctgctgaggaattgtaatcacctgagatataaaa

SEQ ID NO: 195422 - DNA, 79 bp, Homo sapiens
tatgtgttctattccaaaagatgtcatttttgctgactgctgctgaggaattgtaatcacctgagatataaaaacgtaa

SEQ ID NO: 195423 - DNA, 76 bp, Homo sapiens
gttctattccaaaagatgtcatttttgctgactgctgctgaggaattgtaatcacctgagatataaaaacgtaaaa

SEQ ID NO: 195424 - DNA, 77 bp, Homo sapiens
aaagatgtcatttttgctgactgctgctgaggaattgtaatcacctgagatataaaaacgtaaaagtggttagcata

SEQ ID NO: 195425 - DNA, 72 bp, Homo sapiens
atattttataatgcccttgtagataaggattcaatcaaagacacaaacctggaaccgaccccgctgaaatga

SEQ ID NO: 195426 - DNA, 75 bp, Homo sapiens
ataatgcccttgtagataaggattcaatcaaagacacaaacctggaaccgaccccgctgaaatgatccactcatc

SEQ ID NO: 195427 - DNA, 76 bp, Homo sapiens
ataaggattcaatcaaagacacaaacctggaaccgaccccgctgaaatgatccactcatcgctttacatctattca

SEQ ID NO: 195428 - DNA, 75 bp, Homo sapiens
attcaatcaaagacacaaacctggaaccgaccccgctgaaatgatccactcatcgctttacatctattcaaagcc

SEQ ID NO: 195429 - DNA, 75 bp, Homo sapiens
aagacacaaacctggaaccgaccccgctgaaatgatccactcatcgctttacatctattcaaagccctagtatca

SEQ ID NO: 195430 - DNA, 76 bp, Homo sapiens
aaccgaccccgctgaaatgatccactcatcgctttacatctattcaaagccctagtatcagctgtggactcccgtg

SEQ ID NO: 195431 - DNA, 81 bp, Homo sapiens
cgctgaaatgatccactcatcgctttacatctattcaaagccctagtatcagctgtggactcccgtgtcagaggaatggga

SEQ ID NO: 195432 - DNA, 81 bp, Homo sapiens
aatgatccactcatcgctttacatctattcaaagccctagtatcagctgtggactcccgtgtcagaggaatgggatcagga

SEQ ID NO: 195433 - DNA, 82 bp, Homo sapiens
atcgctttacatctattcaaagccctagtatcagctgtggactcccgtgtcagaggaatgggatcaggagcaattgctgatc

SEQ ID NO: 195434 - DNA, 83 bp, Homo sapiens
tattcaaagccctagtatcagctgtggactcccgtgtcagaggaatgggatcaggagcaattgctgatctcatctcttctgtt

SEQ ID NO: 195435 - DNA, 82 bp, Homo sapiens
aaagccctagtatcagctgtggactcccgtgtcagaggaatgggatcaggagcaattgctgatctcatctcttctgtttcca

SEQ ID NO: 195436 - DNA, 85 bp, Homo sapiens
tatcagctgtggactcccgtgtcagaggaatgggatcaggagcaattgctgatctcatctcttctgtttccactgcaagttttgc

SEQ ID NO: 195437 - DNA, 81 bp, Homo sapiens
tcccgtgtcagaggaatgggatcaggagcaattgctgatctcatctcttctgtttccactgcaagttttgccaaattgtaa

SEQ ID NO: 195438 - DNA, 77 bp, Homo sapiens
aggaatgggatcaggagcaattgctgatctcatctcttctgtttccactgcaagttttgccaaattgtaagtaaaaa

SEQ ID NO: 195439 - DNA, 76 bp, Homo sapiens
atcaggagcaattgctgatctcatctcttctgtttccactgcaagttttgccaaattgtaagtaaaaaagagaaaa

SEQ ID NO: 195440 - DNA, 73 bp, Homo sapiens
aaaagtgatgttacctagtctatgtccctgactgtaagcacactaccttgacggacttttgatctcttgaaaa

SEQ ID NO: 195441 - DNA, 73 bp, Homo sapiens
atgttacctagtctatgtccctgactgtaagcacactaccttgacggacttttgatctcttgaaaaagctggt

SEQ ID NO: 195442 - DNA, 76 bp, Homo sapiens
tagtctatgtccctgactgtaagcacactaccttgacggacttttgatctcttgaaaaagctggttgactgccgta

SEQ ID NO: 195443 - DNA, 77 bp, Homo sapiens
ctgactgtaagcacactaccttgacggacttttgatctcttgaaaaagctggttgactgccgtagcctgtatgccca

SEQ ID NO: 195444 - DNA, 73 bp, Homo sapiens
acactaccttgacggacttttgatctcttgaaaaagctggttgactgccgtagcctgtatgcccagcttttta

SEQ ID NO: 195445 - DNA, 74 bp, Homo sapiens
cttgacggacttttgatctcttgaaaaagctggttgactgccgtagcctgtatgcccagctttttaatttgcga

SEQ ID NO: 195446 - DNA, 74 bp, Homo sapiens
ttttgatctcttgaaaaagctggttgactgccgtagcctgtatgcccagctttttaatttgcgagtccaggatt

SEQ ID NO: 195447 - DNA, 75 bp, Homo sapiens
ttgaaaaagctggttgactgccgtagcctgtatgcccagctttttaatttgcgagtccaggatttcttgctaata

SEQ ID NO: 195448 - DNA, 75 bp, Homo sapiens
tggttgactgccgtagcctgtatgcccagctttttaatttgcgagtccaggatttcttgctaataggatttttga

SEQ ID NO: 195449 - DNA, 74 bp, Homo sapiens
gtagcctgtatgcccagctttttaatttgcgagtccaggatttcttgctaataggatttttgagactaggacaa

SEQ ID NO: 195450 - DNA, 70 bp, Homo sapiens
cccagctttttaatttgcgagtccaggatttcttgctaataggatttttgagactaggacaagtaaagct

SEQ ID NO: 195451 - DNA, 71 bp, Homo sapiens
ttttaatttgcgagtccaggatttcttgctaataggatttttgagactaggacaagtaaagcttaggccaa

SEQ ID NO: 195452 - DNA, 71 bp, Homo sapiens
agtccaggatttcttgctaataggatttttgagactaggacaagtaaagcttaggccaaaatatccacctc

SEQ ID NO: 195453 - DNA, 74 bp, Homo sapiens
atttcttgctaataggatttttgagactaggacaagtaaagcttaggccaaaatatccacctcctgtctgcaga

SEQ ID NO: 195454 - DNA, 77 bp, Homo sapiens
taataggatttttgagactaggacaagtaaagcttaggccaaaatatccacctcctgtctgcagatgaatggctcca

SEQ ID NO: 195455 - DNA, 78 bp, Homo sapiens
ttttgagactaggacaagtaaagcttaggccaaaatatccacctcctgtctgcagatgaatggctccaccgcttgaca

SEQ ID NO: 195456 - DNA, 81 bp, Homo sapiens
aggacaagtaaagcttaggccaaaatatccacctcctgtctgcagatgaatggctccaccgcttgacacagcagcaggata

SEQ ID NO: 195457 - DNA, 83 bp, Homo sapiens
aagcttaggccaaaatatccacctcctgtctgcagatgaatggctccaccgcttgacacagcagcaggataggcctctggatc

SEQ ID NO: 195458 - DNA, 83 bp, Homo sapiens
aatatccacctcctgtctgcagatgaatggctccaccgcttgacacagcagcaggataggcctctggatcccctggaagtgaa

SEQ ID NO: 195459 - DNA, 88 bp, Homo sapiens
ctgtctgcagatgaatggctccaccgcttgacacagcagcaggataggcctctggatcccctggaagtgaagcatctgaggacatctc

SEQ ID NO: 195460 - DNA, 84 bp, Homo sapiens
agatgaatggctccaccgcttgacacagcagcaggataggcctctggatcccctggaagtgaagcatctgaggacatctcctaa

SEQ ID NO: 195461 - DNA, 83 bp, Homo sapiens
tccaccgcttgacacagcagcaggataggcctctggatcccctggaagtgaagcatctgaggacatctcctaatggagacaaa

SEQ ID NO: 195462 - DNA, 81 bp, Homo sapiens
ttgacacagcagcaggataggcctctggatcccctggaagtgaagcatctgaggacatctcctaatggagacaaaacaaaa

SEQ ID NO: 195463 - DNA, 73 bp, Homo sapiens
acaataagcaaagagtaaggaattggttagaaagaatgatacttacatgtaaacacaattcgctgggtacaga

SEQ ID NO: 195464 - DNA, 73 bp, Homo sapiens
aagagtaaggaattggttagaaagaatgatacttacatgtaaacacaattcgctgggtacagaagttatcaca

SEQ ID NO: 195465 - DNA, 74 bp, Homo sapiens
taaggaattggttagaaagaatgatacttacatgtaaacacaattcgctgggtacagaagttatcacattcagg

SEQ ID NO: 195466 - DNA, 74 bp, Homo sapiens
ttagaaagaatgatacttacatgtaaacacaattcgctgggtacagaagttatcacattcaggtcccttttgaa

SEQ ID NO: 195467 - DNA, 75 bp, Homo sapiens
atacttacatgtaaacacaattcgctgggtacagaagttatcacattcaggtcccttttgaacactgatatatta

SEQ ID NO: 195468 - DNA, 79 bp, Homo sapiens
aattcgctgggtacagaagttatcacattcaggtcccttttgaacactgatatattagcaggctgacttgcagccacat

SEQ ID NO: 195469 - DNA, 82 bp, Homo sapiens
tacagaagttatcacattcaggtcccttttgaacactgatatattagcaggctgacttgcagccacattggacagaagctta

SEQ ID NO: 195470 - DNA, 83 bp, Homo sapiens
ttatcacattcaggtcccttttgaacactgatatattagcaggctgacttgcagccacattggacagaagcttagagcctgtc

SEQ ID NO: 195471 - DNA, 81 bp, Homo sapiens
tcccttttgaacactgatatattagcaggctgacttgcagccacattggacagaagcttagagcctgtctgttggaaatta

SEQ ID NO: 195472 - DNA, 81 bp, Homo sapiens
acactgatatattagcaggctgacttgcagccacattggacagaagcttagagcctgtctgttggaaattaggggattgta

SEQ ID NO: 195473 - DNA, 79 bp, Homo sapiens
atatattagcaggctgacttgcagccacattggacagaagcttagagcctgtctgttggaaattaggggattgtacagg

SEQ ID NO: 195474 - DNA, 77 bp, Homo sapiens
tgacttgcagccacattggacagaagcttagagcctgtctgttggaaattaggggattgtacagggctatctttaat

SEQ ID NO: 195475 - DNA, 75 bp, Homo sapiens
agccacattggacagaagcttagagcctgtctgttggaaattaggggattgtacagggctatctttaattccaca

SEQ ID NO: 195476 - DNA, 76 bp, Homo sapiens
agaagcttagagcctgtctgttggaaattaggggattgtacagggctatctttaattccacagtgactgatggcta

SEQ ID NO: 195477 - DNA, 77 bp, Homo sapiens
ttagagcctgtctgttggaaattaggggattgtacagggctatctttaattccacagtgactgatggctatgacttc

SEQ ID NO: 195478 - DNA, 79 bp, Homo sapiens
tctgttggaaattaggggattgtacagggctatctttaattccacagtgactgatggctatgacttctgtcactggaca

SEQ ID NO: 195479 - DNA, 77 bp, Homo sapiens
aattaggggattgtacagggctatctttaattccacagtgactgatggctatgacttctgtcactggacaggagagg

SEQ ID NO: 195480 - DNA, 82 bp, Homo sapiens
ttgtacagggctatctttaattccacagtgactgatggctatgacttctgtcactggacaggagagggtatcttcagcagag

SEQ ID NO: 195481 - DNA, 80 bp, Homo sapiens
ctatctttaattccacagtgactgatggctatgacttctgtcactggacaggagagggtatcttcagcagaggaagaaaa

SEQ ID NO: 195482 - DNA, 82 bp, Homo sapiens
acagtgactgatggctatgacttctgtcactggacaggagagggtatcttcagcagaggaagaaaatggagagtctatgctt

SEQ ID NO: 195483 - DNA, 78 bp, Homo sapiens
acttctgtcactggacaggagagggtatcttcagcagaggaagaaaatggagagtctatgctttgggtatccttctga

SEQ ID NO: 195484 - DNA, 78 bp, Homo sapiens
tggacaggagagggtatcttcagcagaggaagaaaatggagagtctatgctttgggtatccttctgactctcgggata

SEQ ID NO: 195485 - DNA, 79 bp, Homo sapiens
agagggtatcttcagcagaggaagaaaatggagagtctatgctttgggtatccttctgactctcgggatagatgctaga

SEQ ID NO: 195486 - DNA, 84 bp, Homo sapiens
agcagaggaagaaaatggagagtctatgctttgggtatccttctgactctcgggatagatgctagagatgctgtgctcctgata

SEQ ID NO: 195487 - DNA, 83 bp, Homo sapiens
gaaaatggagagtctatgctttgggtatccttctgactctcgggatagatgctagagatgctgtgctcctgatagagcaagtt

SEQ ID NO: 195488 - DNA, 81 bp, Homo sapiens
agtctatgctttgggtatccttctgactctcgggatagatgctagagatgctgtgctcctgatagagcaagtttcttaatt

SEQ ID NO: 195489 - DNA, 81 bp, Homo sapiens
atgctttgggtatccttctgactctcgggatagatgctagagatgctgtgctcctgatagagcaagtttcttaatttttca

SEQ ID NO: 195490 - DNA, 80 bp, Homo sapiens
ttctgactctcgggatagatgctagagatgctgtgctcctgatagagcaagtttcttaatttttcatccagagttttaat

SEQ ID NO: 195491 - DNA, 78 bp, Homo sapiens
tctcgggatagatgctagagatgctgtgctcctgatagagcaagtttcttaatttttcatccagagttttaattcggt

SEQ ID NO: 195492 - DNA, 73 bp, Homo sapiens
ctgtgctcctgatagagcaagtttcttaatttttcatccagagttttaattcggttgtctgcaaactccagtt

SEQ ID NO: 195493 - DNA, 72 bp, Homo sapiens
tcctgatagagcaagtttcttaatttttcatccagagttttaattcggttgtctgcaaactccagttttgga

SEQ ID NO: 195494 - DNA, 68 bp, Homo sapiens
gtttcttaatttttcatccagagttttaattcggttgtctgcaaactccagttttggaggtctttctc

SEQ ID NO: 195495 - DNA, 73 bp, Homo sapiens
atccagagttttaattcggttgtctgcaaactccagttttggaggtctttctccatctgattccaggacagta

SEQ ID NO: 195496 - DNA, 73 bp, Homo sapiens
ttaattcggttgtctgcaaactccagttttggaggtctttctccatctgattccaggacagtagtgggttgaa

SEQ ID NO: 195497 - DNA, 73 bp, Homo sapiens
tgcaaactccagttttggaggtctttctccatctgattccaggacagtagtgggttgaagggtagttggttca

SEQ ID NO: 195498 - DNA, 70 bp, Homo sapiens
agttttggaggtctttctccatctgattccaggacagtagtgggttgaagggtagttggttcaaggccag

SEQ ID NO: 195499 - DNA, 71 bp, Homo sapiens
aggtctttctccatctgattccaggacagtagtgggttgaagggtagttggttcaaggccaggggtctgag

SEQ ID NO: 195500 - DNA, 73 bp, Homo sapiens
tctgattccaggacagtagtgggttgaagggtagttggttcaaggccaggggtctgagtgggaatgactgtct

SEQ ID NO: 195501 - DNA, 71 bp, Homo sapiens
tagtgggttgaagggtagttggttcaaggccaggggtctgagtgggaatgactgtcttaggagaacttgct

SEQ ID NO: 195502 - DNA, 72 bp, Homo sapiens
aagggtagttggttcaaggccaggggtctgagtgggaatgactgtcttaggagaacttgcttcagtgttcac

SEQ ID NO: 195503 - DNA, 74 bp, Homo sapiens
gttcaaggccaggggtctgagtgggaatgactgtcttaggagaacttgcttcagtgttcactgtagtttctcct

SEQ ID NO: 195504 - DNA, 78 bp, Homo sapiens
ggaatgactgtcttaggagaacttgcttcagtgttcactgtagtttctccttcttgagaaataaactctgcatccata

SEQ ID NO: 195505 - DNA, 78 bp, Homo sapiens
actgtcttaggagaacttgcttcagtgttcactgtagtttctccttcttgagaaataaactctgcatccatagctggc

SEQ ID NO: 195506 - DNA, 81 bp, Homo sapiens
agaacttgcttcagtgttcactgtagtttctccttcttgagaaataaactctgcatccatagctggctgctgtactgataa

SEQ ID NO: 195507 - DNA, 79 bp, Homo sapiens
tagtttctccttcttgagaaataaactctgcatccatagctggctgctgtactgataaggtttgaggcttttgatcaaa

SEQ ID NO: 195508 - DNA, 82 bp, Homo sapiens
ttcttgagaaataaactctgcatccatagctggctgctgtactgataaggtttgaggcttttgatcaaatgccagagttgta

SEQ ID NO: 195509 - DNA, 80 bp, Homo sapiens
catccatagctggctgctgtactgataaggtttgaggcttttgatcaaatgccagagttgtaagagagttaccagaagtc

SEQ ID NO: 195510 - DNA, 79 bp, Homo sapiens
tggctgctgtactgataaggtttgaggcttttgatcaaatgccagagttgtaagagagttaccagaagtctgagttgat

SEQ ID NO: 195511 - DNA, 78 bp, Homo sapiens
tgtactgataaggtttgaggcttttgatcaaatgccagagttgtaagagagttaccagaagtctgagttgattcgcca

SEQ ID NO: 195512 - DNA, 78 bp, Homo sapiens
tttgaggcttttgatcaaatgccagagttgtaagagagttaccagaagtctgagttgattcgccaggatgggacataa

SEQ ID NO: 195513 - DNA, 81 bp, Homo sapiens
ttttgatcaaatgccagagttgtaagagagttaccagaagtctgagttgattcgccaggatgggacataagtgcatcagcc

SEQ ID NO: 195514 - DNA, 82 bp, Homo sapiens
aaatgccagagttgtaagagagttaccagaagtctgagttgattcgccaggatgggacataagtgcatcagcctgactggca

SEQ ID NO: 195515 - DNA, 79 bp, Homo sapiens
agttgtaagagagttaccagaagtctgagttgattcgccaggatgggacataagtgcatcagcctgactggcagtttgg

SEQ ID NO: 195516 - DNA, 83 bp, Homo sapiens
agttaccagaagtctgagttgattcgccaggatgggacataagtgcatcagcctgactggcagtttggtgacatggatacaca

SEQ ID NO: 195517 - DNA, 84 bp, Homo sapiens
atgggacataagtgcatcagcctgactggcagtttggtgacatggatacacaggtatgaatatgcttgcttgtttggtgagtcc

SEQ ID NO: 195518 - DNA, 86 bp, Homo sapiens
taagtgcatcagcctgactggcagtttggtgacatggatacacaggtatgaatatgcttgcttgtttggtgagtccctcacattca

SEQ ID NO: 195519 - DNA, 83 bp, Homo sapiens
agcctgactggcagtttggtgacatggatacacaggtatgaatatgcttgcttgtttggtgagtccctcacattcagctggaa

SEQ ID NO: 195520 - DNA, 83 bp, Homo sapiens
tttggtgacatggatacacaggtatgaatatgcttgcttgtttggtgagtccctcacattcagctggaactgcacgaactgaa

SEQ ID NO: 195521 - DNA, 82 bp, Homo sapiens
atggatacacaggtatgaatatgcttgcttgtttggtgagtccctcacattcagctggaactgcacgaactgaagtagtaga

SEQ ID NO: 195522 - DNA, 80 bp, Homo sapiens
gtatgaatatgcttgcttgtttggtgagtccctcacattcagctggaactgcacgaactgaagtagtagagtaactggaa

SEQ ID NO: 195523 - DNA, 79 bp, Homo sapiens
tatgcttgcttgtttggtgagtccctcacattcagctggaactgcacgaactgaagtagtagagtaactggaactatta

SEQ ID NO: 195524 - DNA, 76 bp, Homo sapiens
agtccctcacattcagctggaactgcacgaactgaagtagtagagtaactggaactattagtaactggtgccatta

SEQ ID NO: 195525 - DNA, 77 bp, Homo sapiens
attcagctggaactgcacgaactgaagtagtagagtaactggaactattagtaactggtgccattatctgcctgtta

SEQ ID NO: 195526 - DNA, 78 bp, Homo sapiens
tgcacgaactgaagtagtagagtaactggaactattagtaactggtgccattatctgcctgttatcttccacttgata

SEQ ID NO: 195527 - DNA, 74 bp, Homo sapiens
aagtagtagagtaactggaactattagtaactggtgccattatctgcctgttatcttccacttgataaagtata

SEQ ID NO: 195528 - DNA, 77 bp, Homo sapiens
agtaactggaactattagtaactggtgccattatctgcctgttatcttccacttgataaagtatagctggctgcttg

SEQ ID NO: 195529 - DNA, 77 bp, Homo sapiens
aactattagtaactggtgccattatctgcctgttatcttccacttgataaagtatagctggctgcttggtttctaca

SEQ ID NO: 195530 - DNA, 79 bp, Homo sapiens
agtaactggtgccattatctgcctgttatcttccacttgataaagtatagctggctgcttggtttctacactagcacat

SEQ ID NO: 195531 - DNA, 79 bp, Homo sapiens
attatctgcctgttatcttccacttgataaagtatagctggctgcttggtttctacactagcacattcagaaatcttac

SEQ ID NO: 195532 - DNA, 80 bp, Homo sapiens
ttatcttccacttgataaagtatagctggctgcttggtttctacactagcacattcagaaatcttaccatcaaccacatc

SEQ ID NO: 195533 - DNA, 78 bp, Homo sapiens
acttgataaagtatagctggctgcttggtttctacactagcacattcagaaatcttaccatcaaccacatccttgtgt

SEQ ID NO: 195534 - DNA, 79 bp, Homo sapiens
taaagtatagctggctgcttggtttctacactagcacattcagaaatcttaccatcaaccacatccttgtgttctgatt

SEQ ID NO: 195535 - DNA, 77 bp, Homo sapiens
ctgcttggtttctacactagcacattcagaaatcttaccatcaaccacatccttgtgttctgatttggaggtgaaaa

SEQ ID NO: 195536 - DNA, 77 bp, Homo sapiens
gtttctacactagcacattcagaaatcttaccatcaaccacatccttgtgttctgatttggaggtgaaaagtgcacg

SEQ ID NO: 195537 - DNA, 75 bp, Homo sapiens
aaatcttaccatcaaccacatccttgtgttctgatttggaggtgaaaagtgcacggtggcatggattattttcta

SEQ ID NO: 195538 - DNA, 78 bp, Homo sapiens
cttgtgttctgatttggaggtgaaaagtgcacggtggcatggattattttctatagtgagcaatgtgtcccgtgatat

SEQ ID NO: 195539 - DNA, 74 bp, Homo sapiens
agtgcacggtggcatggattattttctatagtgagcaatgtgtcccgtgatatttccttattacttgtgttttt

SEQ ID NO: 195540 - DNA, 73 bp, Homo sapiens
tggattattttctatagtgagcaatgtgtcccgtgatatttccttattacttgtgttttttggacctggaaca

SEQ ID NO: 195541 - DNA, 72 bp, Homo sapiens
ctatagtgagcaatgtgtcccgtgatatttccttattacttgtgttttttggacctggaacaataataaaga

SEQ ID NO: 195542 - DNA, 70 bp, Homo sapiens
tcccgtgatatttccttattacttgtgttttttggacctggaacaataataaagaatggctaagcacgta

SEQ ID NO: 195543 - DNA, 74 bp, Homo sapiens
atcccatcctttgagtctggacaaagctggcagagaagaaaagcttactaggaagtggatgtcggccaggaacc

SEQ ID NO: 195544 - DNA, 77 bp, Homo sapiens
tttgagtctggacaaagctggcagagaagaaaagcttactaggaagtggatgtcggccaggaaccgcagacatggaa

SEQ ID NO: 195545 - DNA, 78 bp, Homo sapiens
acaaagctggcagagaagaaaagcttactaggaagtggatgtcggccaggaaccgcagacatggaatgctgaagagaa

SEQ ID NO: 195546 - DNA, 76 bp, Homo sapiens
agagaagaaaagcttactaggaagtggatgtcggccaggaaccgcagacatggaatgctgaagagaaggaggagac

SEQ ID NO: 195547 - DNA, 78 bp, Homo sapiens
aaaagcttactaggaagtggatgtcggccaggaaccgcagacatggaatgctgaagagaaggaggagactgagtctca

SEQ ID NO: 195548 - DNA, 78 bp, Homo sapiens
taggaagtggatgtcggccaggaaccgcagacatggaatgctgaagagaaggaggagactgagtctcacggtttctta

SEQ ID NO: 195549 - DNA, 81 bp, Homo sapiens
tgtcggccaggaaccgcagacatggaatgctgaagagaaggaggagactgagtctcacggtttcttatcgtctgattgata

SEQ ID NO: 195550 - DNA, 80 bp, Homo sapiens
aggaaccgcagacatggaatgctgaagagaaggaggagactgagtctcacggtttcttatcgtctgattgatacagaatc

SEQ ID NO: 195551 - DNA, 79 bp, Homo sapiens
atggaatgctgaagagaaggaggagactgagtctcacggtttcttatcgtctgattgatacagaatcgccaccgaccaa

SEQ ID NO: 195552 - DNA, 76 bp, Homo sapiens
ctgaagagaaggaggagactgagtctcacggtttcttatcgtctgattgatacagaatcgccaccgaccaactggg

SEQ ID NO: 195553 - DNA, 80 bp, Homo sapiens
gagactgagtctcacggtttcttatcgtctgattgatacagaatcgccaccgaccaactggggatgactgaggagcagat

SEQ ID NO: 195554 - DNA, 82 bp, Homo sapiens
agtctcacggtttcttatcgtctgattgatacagaatcgccaccgaccaactggggatgactgaggagcagattcatctgca

SEQ ID NO: 195555 - DNA, 82 bp, Homo sapiens
tttcttatcgtctgattgatacagaatcgccaccgaccaactggggatgactgaggagcagattcatctgcagaaataatta

SEQ ID NO: 195556 - DNA, 81 bp, Homo sapiens
cgtctgattgatacagaatcgccaccgaccaactggggatgactgaggagcagattcatctgcagaaataattagcaaaaa

SEQ ID NO: 195557 - DNA, 80 bp, Homo sapiens
atacagaatcgccaccgaccaactggggatgactgaggagcagattcatctgcagaaataattagcaaaaaataatatgc

SEQ ID NO: 195558 - DNA, 68 bp, Homo sapiens
caatgaaggtgtgttaaaagttttcaaatgtcttgcttcaaaaaccaaatgataaattttactaaata

SEQ ID NO: 195559 - DNA, 67 bp, Homo sapiens
aaaagttttcaaatgtcttgcttcaaaaaccaaatgataaattttactaaatatacttactgctggt

SEQ ID NO: 195560 - DNA, 73 bp, Homo sapiens
caaatgtcttgcttcaaaaaccaaatgataaattttactaaatatacttactgctggtttgagtagatgtaga

SEQ ID NO: 195561 - DNA, 72 bp, Homo sapiens
gcttcaaaaaccaaatgataaattttactaaatatacttactgctggtttgagtagatgtagaatttatctg

SEQ ID NO: 195562 - DNA, 76 bp, Homo sapiens
caaatgataaattttactaaatatacttactgctggtttgagtagatgtagaatttatctgtacttgttcagatga

SEQ ID NO: 195563 - DNA, 76 bp, Homo sapiens
attttactaaatatacttactgctggtttgagtagatgtagaatttatctgtacttgttcagatgaccctgtctga

SEQ ID NO: 195564 - DNA, 76 bp, Homo sapiens
ctaaatatacttactgctggtttgagtagatgtagaatttatctgtacttgttcagatgaccctgtctgaattaaa

SEQ ID NO: 195565 - DNA, 77 bp, Homo sapiens
cttactgctggtttgagtagatgtagaatttatctgtacttgttcagatgaccctgtctgaattaaaaatgaataga

SEQ ID NO: 195566 - DNA, 75 bp, Homo sapiens
gtttgagtagatgtagaatttatctgtacttgttcagatgaccctgtctgaattaaaaatgaatagataaattaa

SEQ ID NO: 195567 - DNA, 72 bp, Homo sapiens
agaatttatctgtacttgttcagatgaccctgtctgaattaaaaatgaatagataaattaaaaagttcctga

SEQ ID NO: 195568 - DNA, 77 bp, Homo sapiens
tctgtacttgttcagatgaccctgtctgaattaaaaatgaatagataaattaaaaagttcctgattcatatctgaga

SEQ ID NO: 195569 - DNA, 75 bp, Homo sapiens
cctgtctgaattaaaaatgaatagataaattaaaaagttcctgattcatatctgagaagatctgtttgctaaaca

SEQ ID NO: 195570 - DNA, 74 bp, Homo sapiens
aaaatgaatagataaattaaaaagttcctgattcatatctgagaagatctgtttgctaaacaattgttctcacc

SEQ ID NO: 195571 - DNA, 76 bp, Homo sapiens
gataaattaaaaagttcctgattcatatctgagaagatctgtttgctaaacaattgttctcacctggctactgttg

SEQ ID NO: 195572 - DNA, 81 bp, Homo sapiens
ctgattcatatctgagaagatctgtttgctaaacaattgttctcacctggctactgttggagtccacagtaatagaatcaa

SEQ ID NO: 195573 - DNA, 79 bp, Homo sapiens
atatctgagaagatctgtttgctaaacaattgttctcacctggctactgttggagtccacagtaatagaatcaactcca

SEQ ID NO: 195574 - DNA, 76 bp, Homo sapiens
atctgtttgctaaacaattgttctcacctggctactgttggagtccacagtaatagaatcaactccagtggctctt

SEQ ID NO: 195575 - DNA, 77 bp, Homo sapiens
taaacaattgttctcacctggctactgttggagtccacagtaatagaatcaactccagtggctctttctgtggcaaa

SEQ ID NO: 195576 - DNA, 78 bp, Homo sapiens
attgttctcacctggctactgttggagtccacagtaatagaatcaactccagtggctctttctgtggcaaagtggaca

SEQ ID NO: 195577 - DNA, 78 bp, Homo sapiens
ctactgttggagtccacagtaatagaatcaactccagtggctctttctgtggcaaagtggacatgaaggatctcctgg

SEQ ID NO: 195578 - DNA, 78 bp, Homo sapiens
agtccacagtaatagaatcaactccagtggctctttctgtggcaaagtggacatgaaggatctcctgggcttgaccta

SEQ ID NO: 195579 - DNA, 78 bp, Homo sapiens
acagtaatagaatcaactccagtggctctttctgtggcaaagtggacatgaaggatctcctgggcttgacctacaata

SEQ ID NO: 195580 - DNA, 79 bp, Homo sapiens
atcaactccagtggctctttctgtggcaaagtggacatgaaggatctcctgggcttgacctacaatagctctcaattct

SEQ ID NO: 195581 - DNA, 76 bp, Homo sapiens
ctctttctgtggcaaagtggacatgaaggatctcctgggcttgacctacaatagctctcaattcttctacaaattt

SEQ ID NO: 195582 - DNA, 76 bp, Homo sapiens
tctgtggcaaagtggacatgaaggatctcctgggcttgacctacaatagctctcaattcttctacaaatttttctt

SEQ ID NO: 195583 - DNA, 74 bp, Homo sapiens
agtggacatgaaggatctcctgggcttgacctacaatagctctcaattcttctacaaatttttctttctcactt

SEQ ID NO: 195584 - DNA, 74 bp, Homo sapiens
tctcctgggcttgacctacaatagctctcaattcttctacaaatttttctttctcactttccagcacaaagtta

SEQ ID NO: 195585 - DNA, 74 bp, Homo sapiens
ggcttgacctacaatagctctcaattcttctacaaatttttctttctcactttccagcacaaagttatcttcaa

SEQ ID NO: 195586 - DNA, 74 bp, Homo sapiens
tacaatagctctcaattcttctacaaatttttctttctcactttccagcacaaagttatcttcaacctgcccaa

SEQ ID NO: 195587 - DNA, 69 bp, Homo sapiens
attcttctacaaatttttctttctcactttccagcacaaagttatcttcaacctgcccaaaagtaagtc

SEQ ID NO: 195588 - DNA, 72 bp, Homo sapiens
caaatttttctttctcactttccagcacaaagttatcttcaacctgcccaaaagtaagtctattcatgagaa

SEQ ID NO: 195589 - DNA, 80 bp, Homo sapiens
aaaaagacagaatgctgaagggaagataatttggtcttactgcacttaccatatagtctgcaatatcctctggcgcatca

SEQ ID NO: 195590 - DNA, 83 bp, Homo sapiens
aatgctgaagggaagataatttggtcttactgcacttaccatatagtctgcaatatcctctggcgcatcaccatcaacatcaa

SEQ ID NO: 195591 - DNA, 80 bp, Homo sapiens
aagataatttggtcttactgcacttaccatatagtctgcaatatcctctggcgcatcaccatcaacatcaaacttgaagg

SEQ ID NO: 195592 - DNA, 82 bp, Homo sapiens
atttggtcttactgcacttaccatatagtctgcaatatcctctggcgcatcaccatcaacatcaaacttgaaggtgaccatc

SEQ ID NO: 195593 - DNA, 82 bp, Homo sapiens
acttaccatatagtctgcaatatcctctggcgcatcaccatcaacatcaaacttgaaggtgaccatcttgttgttgtgtgtc

SEQ ID NO: 195594 - DNA, 86 bp, Homo sapiens
atatagtctgcaatatcctctggcgcatcaccatcaacatcaaacttgaaggtgaccatcttgttgttgtgtgtctccagctgaca

SEQ ID NO: 195595 - DNA, 83 bp, Homo sapiens
aatatcctctggcgcatcaccatcaacatcaaacttgaaggtgaccatcttgttgttgtgtgtctccagctgacactctacca

SEQ ID NO: 195596 - DNA, 84 bp, Homo sapiens
cgcatcaccatcaacatcaaacttgaaggtgaccatcttgttgttgtgtgtctccagctgacactctaccatgttatctccaga

SEQ ID NO: 195597 - DNA, 82 bp, Homo sapiens
tcaacatcaaacttgaaggtgaccatcttgttgttgtgtgtctccagctgacactctaccatgttatctccagaggttgata

SEQ ID NO: 195598 - DNA, 79 bp, Homo sapiens
aaacttgaaggtgaccatcttgttgttgtgtgtctccagctgacactctaccatgttatctccagaggttgatacctga

SEQ ID NO: 195599 - DNA, 80 bp, Homo sapiens
tgaccatcttgttgttgtgtgtctccagctgacactctaccatgttatctccagaggttgatacctgagtacaaacattt

SEQ ID NO: 195600 - DNA, 76 bp, Homo sapiens
ttgttgtgtgtctccagctgacactctaccatgttatctccagaggttgatacctgagtacaaacattttaccggt

SEQ ID NO: 195601 - DNA, 76 bp, Homo sapiens
tctccagctgacactctaccatgttatctccagaggttgatacctgagtacaaacattttaccggtttaagagtca

SEQ ID NO: 195602 - DNA, 71 bp, Homo sapiens
cagacctctatatgtactcttaaccaaaccatatttacaaactgacctgaaggacggtaagctgaaattta

SEQ ID NO: 195603 - DNA, 70 bp, Homo sapiens
ctctatatgtactcttaaccaaaccatatttacaaactgacctgaaggacggtaagctgaaatttagtcc

SEQ ID NO: 195604 - DNA, 67 bp, Homo sapiens
actcttaaccaaaccatatttacaaactgacctgaaggacggtaagctgaaatttagtccccttctc

SEQ ID NO: 195605 - DNA, 68 bp, Homo sapiens
atatttacaaactgacctgaaggacggtaagctgaaatttagtccccttctctggtcggggacaggaa

SEQ ID NO: 195606 - DNA, 70 bp, Homo sapiens
tacaaactgacctgaaggacggtaagctgaaatttagtccccttctctggtcggggacaggaagctcttc

SEQ ID NO: 195607 - DNA, 70 bp, Homo sapiens
aaggacggtaagctgaaatttagtccccttctctggtcggggacaggaagctcttctctgtttgatccga

SEQ ID NO: 195608 - DNA, 74 bp, Homo sapiens
taagctgaaatttagtccccttctctggtcggggacaggaagctcttctctgtttgatccgatcctgtttgcca

SEQ ID NO: 195609 - DNA, 72 bp, Homo sapiens
aatttagtccccttctctggtcggggacaggaagctcttctctgtttgatccgatcctgtttgccatttcca

SEQ ID NO: 195610 - DNA, 74 bp, Homo sapiens
ccttctctggtcggggacaggaagctcttctctgtttgatccgatcctgtttgccatttccacttgggttatca

SEQ ID NO: 195611 - DNA, 74 bp, Homo sapiens
gacaggaagctcttctctgtttgatccgatcctgtttgccatttccacttgggttatcagggctactgacgttt

SEQ ID NO: 195612 - DNA, 73 bp, Homo sapiens
tcttctctgtttgatccgatcctgtttgccatttccacttgggttatcagggctactgacgttttccttcgta

SEQ ID NO: 195613 - DNA, 73 bp, Homo sapiens
tctgtttgatccgatcctgtttgccatttccacttgggttatcagggctactgacgttttccttcgtagttgc

SEQ ID NO: 195614 - DNA, 73 bp, Homo sapiens
cctgtttgccatttccacttgggttatcagggctactgacgttttccttcgtagttgccacatcttgattcaa

SEQ ID NO: 195615 - DNA, 73 bp, Homo sapiens
atttccacttgggttatcagggctactgacgttttccttcgtagttgccacatcttgattcaagctagtaata

SEQ ID NO: 195616 - DNA, 71 bp, Homo sapiens
acttgggttatcagggctactgacgttttccttcgtagttgccacatcttgattcaagctagtaatatttt

SEQ ID NO: 195617 - DNA, 70 bp, Homo sapiens
atcagggctactgacgttttccttcgtagttgccacatcttgattcaagctagtaatatttttaaaaaag

SEQ ID NO: 195618 - DNA, 76 bp, Homo sapiens
gcacctaatgagtaaacaaacttcagcatatcctcattgttctcatggtattaatttgaagatacttaccttcgaa

SEQ ID NO: 195619 - DNA, 73 bp, Homo sapiens
acaaacttcagcatatcctcattgttctcatggtattaatttgaagatacttaccttcgaactaaatctggtt

SEQ ID NO: 195620 - DNA, 76 bp, Homo sapiens
tcagcatatcctcattgttctcatggtattaatttgaagatacttaccttcgaactaaatctggttttagaagagc

SEQ ID NO: 195621 - DNA, 73 bp, Homo sapiens
cattgttctcatggtattaatttgaagatacttaccttcgaactaaatctggttttagaagagctgcttgttg

SEQ ID NO: 195622 - DNA, 73 bp, Homo sapiens
tggtattaatttgaagatacttaccttcgaactaaatctggttttagaagagctgcttgttgttcagctccaa

SEQ ID NO: 195623 - DNA, 72 bp, Homo sapiens
taatttgaagatacttaccttcgaactaaatctggttttagaagagctgcttgttgttcagctccaactggt

SEQ ID NO: 195624 - DNA, 72 bp, Homo sapiens
atacttaccttcgaactaaatctggttttagaagagctgcttgttgttcagctccaactggttgggatacag

SEQ ID NO: 195625 - DNA, 74 bp, Homo sapiens
aactaaatctggttttagaagagctgcttgttgttcagctccaactggttgggatacaggctgtaaacagtaca

SEQ ID NO: 195626 - DNA, 74 bp, Homo sapiens
gttttagaagagctgcttgttgttcagctccaactggttgggatacaggctgtaaacagtacagacataaaact

SEQ ID NO: 195627 - DNA, 78 bp, Homo sapiens
aagagctgcttgttgttcagctccaactggttgggatacaggctgtaaacagtacagacataaaacttgctatgataa

SEQ ID NO: 195628 - DNA, 75 bp, Homo sapiens
ttgttcagctccaactggttgggatacaggctgtaaacagtacagacataaaacttgctatgataacagtaaaat

SEQ ID NO: 195629 - DNA, 74 bp, Homo sapiens
caactggttgggatacaggctgtaaacagtacagacataaaacttgctatgataacagtaaaattcaagctaaa

SEQ ID NO: 195630 - DNA, 70 bp, Homo sapiens
gcagtgtttaatttgtttaaatgaatacagaacctctaaaatgtgtcttacctttatctgtgggaccttc

SEQ ID NO: 195631 - DNA, 70 bp, Homo sapiens
gtttaaatgaatacagaacctctaaaatgtgtcttacctttatctgtgggaccttctgaacagttaatgg

SEQ ID NO: 195632 - DNA, 70 bp, Homo sapiens
atgaatacagaacctctaaaatgtgtcttacctttatctgtgggaccttctgaacagttaatggggaaac

SEQ ID NO: 195633 - DNA, 69 bp, Homo sapiens
tctaaaatgtgtcttacctttatctgtgggaccttctgaacagttaatggggaaacctggggttgtgaa

SEQ ID NO: 195634 - DNA, 68 bp, Homo sapiens
atgtgtcttacctttatctgtgggaccttctgaacagttaatggggaaacctggggttgtgaaacaac

SEQ ID NO: 195635 - DNA, 68 bp, Homo sapiens
tttatctgtgggaccttctgaacagttaatggggaaacctggggttgtgaaacaactgtcggtccaag

SEQ ID NO: 195636 - DNA, 69 bp, Homo sapiens
ccttctgaacagttaatggggaaacctggggttgtgaaacaactgtcggtccaaggacatgtacaggta

SEQ ID NO: 195637 - DNA, 67 bp, Homo sapiens
aacagttaatggggaaacctggggttgtgaaacaactgtcggtccaaggacatgtacaggtaaaaca

SEQ ID NO: 195638 - DNA, 70 bp, Homo sapiens
gaaacctggggttgtgaaacaactgtcggtccaaggacatgtacaggtaaaacagtggactgaccttgaa

SEQ ID NO: 195639 - DNA, 71 bp, Homo sapiens
gttgtgaaacaactgtcggtccaaggacatgtacaggtaaaacagtggactgaccttgaaccaaaggcaaa

SEQ ID NO: 195640 - DNA, 71 bp, Homo sapiens
aaacaactgtcggtccaaggacatgtacaggtaaaacagtggactgaccttgaaccaaaggcaaaatctgc

SEQ ID NO: 195641 - DNA, 76 bp, Homo sapiens
tccaaggacatgtacaggtaaaacagtggactgaccttgaaccaaaggcaaaatctgcggctgagtcagctttgaa

SEQ ID NO: 195642 - DNA, 77 bp, Homo sapiens
atgtacaggtaaaacagtggactgaccttgaaccaaaggcaaaatctgcggctgagtcagctttgaatgcttctgta

SEQ ID NO: 195643 - DNA, 76 bp, Homo sapiens
taaaacagtggactgaccttgaaccaaaggcaaaatctgcggctgagtcagctttgaatgcttctgtaactgttaa

SEQ ID NO: 195644 - DNA, 73 bp, Homo sapiens
actgaccttgaaccaaaggcaaaatctgcggctgagtcagctttgaatgcttctgtaactgttaaaataaggg

SEQ ID NO: 195645 - DNA, 72 bp, Homo sapiens
ttgaaccaaaggcaaaatctgcggctgagtcagctttgaatgcttctgtaactgttaaaataaggggaaaaa

SEQ ID NO: 195646 - DNA, 71 bp, Homo sapiens
ggcaaaatctgcggctgagtcagctttgaatgcttctgtaactgttaaaataaggggaaaaaaagattaaa

SEQ ID NO: 195647 - DNA, 72 bp, Homo sapiens
cagtaaatacactgattatatatttaaaaatataacagttcacctcacccctgaaacttgctggtaatgtcc

SEQ ID NO: 195648 - DNA, 75 bp, Homo sapiens
tgattatatatttaaaaatataacagttcacctcacccctgaaacttgctggtaatgtcctactagttgctgaga

SEQ ID NO: 195649 - DNA, 73 bp, Homo sapiens
tttaaaaatataacagttcacctcacccctgaaacttgctggtaatgtcctactagttgctgagatgaataaa

SEQ ID NO: 195650 - DNA, 74 bp, Homo sapiens
aaatataacagttcacctcacccctgaaacttgctggtaatgtcctactagttgctgagatgaataaatttgcc

SEQ ID NO: 195651 - DNA, 75 bp, Homo sapiens
ttcacctcacccctgaaacttgctggtaatgtcctactagttgctgagatgaataaatttgccctggaacattta

SEQ ID NO: 195652 - DNA, 77 bp, Homo sapiens
tgaaacttgctggtaatgtcctactagttgctgagatgaataaatttgccctggaacatttacttcagcctgcggga

SEQ ID NO: 195653 - DNA, 76 bp, Homo sapiens
tggtaatgtcctactagttgctgagatgaataaatttgccctggaacatttacttcagcctgcgggatattagaaa

SEQ ID NO: 195654 - DNA, 75 bp, Homo sapiens
tgtcctactagttgctgagatgaataaatttgccctggaacatttacttcagcctgcgggatattagaaaccatt

SEQ ID NO: 195655 - DNA, 75 bp, Homo sapiens
tgagatgaataaatttgccctggaacatttacttcagcctgcgggatattagaaaccatttgagagcccatcgtt

SEQ ID NO: 195656 - DNA, 72 bp, Homo sapiens
ataaatttgccctggaacatttacttcagcctgcgggatattagaaaccatttgagagcccatcgtttgatt

SEQ ID NO: 195657 - DNA, 76 bp, Homo sapiens
tggaacatttacttcagcctgcgggatattagaaaccatttgagagcccatcgtttgatttgaggaataggctaca

SEQ ID NO: 195658 - DNA, 74 bp, Homo sapiens
atttacttcagcctgcgggatattagaaaccatttgagagcccatcgtttgatttgaggaataggctacactgg

SEQ ID NO: 195659 - DNA, 77 bp, Homo sapiens
tgcgggatattagaaaccatttgagagcccatcgtttgatttgaggaataggctacactgggctgacttgaagtatc

SEQ ID NO: 195660 - DNA, 78 bp, Homo sapiens
ttagaaaccatttgagagcccatcgtttgatttgaggaataggctacactgggctgacttgaagtatctgaatgtata

SEQ ID NO: 195661 - DNA, 82 bp, Homo sapiens
atttgagagcccatcgtttgatttgaggaataggctacactgggctgacttgaagtatctgaatgtataactgatgcagctc

SEQ ID NO: 195662 - DNA, 83 bp, Homo sapiens
atcgtttgatttgaggaataggctacactgggctgacttgaagtatctgaatgtataactgatgcagctcctgcctcagacaa

SEQ ID NO: 195663 - DNA, 83 bp, Homo sapiens
atttgaggaataggctacactgggctgacttgaagtatctgaatgtataactgatgcagctcctgcctcagacaaattgtcac

SEQ ID NO: 195664 - DNA, 82 bp, Homo sapiens
aataggctacactgggctgacttgaagtatctgaatgtataactgatgcagctcctgcctcagacaaattgtcacctataaa

SEQ ID NO: 195665 - DNA, 77 bp, Homo sapiens
cttgaagtatctgaatgtataactgatgcagctcctgcctcagacaaattgtcacctataaaaaaagaaaataagta

SEQ ID NO: 195666 - DNA, 78 bp, Homo sapiens
aatataattgcacatgcgtttgcttttacaagctgtaactgtgttacctgtaacagaggagcagtgctgctgtggttt

SEQ ID NO: 195667 - DNA, 78 bp, Homo sapiens
attgcacatgcgtttgcttttacaagctgtaactgtgttacctgtaacagaggagcagtgctgctgtggttttctttg

SEQ ID NO: 195668 - DNA, 76 bp, Homo sapiens
tttgcttttacaagctgtaactgtgttacctgtaacagaggagcagtgctgctgtggttttctttgtagaagctgt

SEQ ID NO: 195669 - DNA, 77 bp, Homo sapiens
aagctgtaactgtgttacctgtaacagaggagcagtgctgctgtggttttctttgtagaagctgttgtctaacatgt

SEQ ID NO: 195670 - DNA, 79 bp, Homo sapiens
tgttacctgtaacagaggagcagtgctgctgtggttttctttgtagaagctgttgtctaacatgttgatcaacttcagt

SEQ ID NO: 195671 - DNA, 78 bp, Homo sapiens
cctgtaacagaggagcagtgctgctgtggttttctttgtagaagctgttgtctaacatgttgatcaacttcagtttct

SEQ ID NO: 195672 - DNA, 80 bp, Homo sapiens
aggagcagtgctgctgtggttttctttgtagaagctgttgtctaacatgttgatcaacttcagtttcttcacattcagcc

SEQ ID NO: 195673 - DNA, 77 bp, Homo sapiens
gtggttttctttgtagaagctgttgtctaacatgttgatcaacttcagtttcttcacattcagccccagtttgctga

SEQ ID NO: 195674 - DNA, 78 bp, Homo sapiens
tttctttgtagaagctgttgtctaacatgttgatcaacttcagtttcttcacattcagccccagtttgctgagcggga

SEQ ID NO: 195675 - DNA, 76 bp, Homo sapiens
tgttgtctaacatgttgatcaacttcagtttcttcacattcagccccagtttgctgagcgggagcaaggggtaaag

SEQ ID NO: 195676 - DNA, 75 bp, Homo sapiens
taacatgttgatcaacttcagtttcttcacattcagccccagtttgctgagcgggagcaaggggtaaagttgtat

SEQ ID NO: 195677 - DNA, 73 bp, Homo sapiens
aacttcagtttcttcacattcagccccagtttgctgagcgggagcaaggggtaaagttgtattctggggctga

SEQ ID NO: 195678 - DNA, 74 bp, Homo sapiens
ttcttcacattcagccccagtttgctgagcgggagcaaggggtaaagttgtattctggggctgagggaatacat

SEQ ID NO: 195679 - DNA, 72 bp, Homo sapiens
acattcagccccagtttgctgagcgggagcaaggggtaaagttgtattctggggctgagggaatacattccc

SEQ ID NO: 195680 - DNA, 73 bp, Homo sapiens
agtttgctgagcgggagcaaggggtaaagttgtattctggggctgagggaatacattccccatagacttgcac

SEQ ID NO: 195681 - DNA, 73 bp, Homo sapiens
agcgggagcaaggggtaaagttgtattctggggctgagggaatacattccccatagacttgcactgagaatcc

SEQ ID NO: 195682 - DNA, 74 bp, Homo sapiens
gtaaagttgtattctggggctgagggaatacattccccatagacttgcactgagaatccctgcgttcttccaaa

SEQ ID NO: 195683 - DNA, 78 bp, Homo sapiens
gttgtattctggggctgagggaatacattccccatagacttgcactgagaatccctgcgttcttccaaacagccagca

SEQ ID NO: 195684 - DNA, 78 bp, Homo sapiens
ctgagggaatacattccccatagacttgcactgagaatccctgcgttcttccaaacagccagcaggcttcttctctct

SEQ ID NO: 195685 - DNA, 78 bp, Homo sapiens
aatacattccccatagacttgcactgagaatccctgcgttcttccaaacagccagcaggcttcttctctcttgtcttc

SEQ ID NO: 195686 - DNA, 79 bp, Homo sapiens
atagacttgcactgagaatccctgcgttcttccaaacagccagcaggcttcttctctcttgtcttctttattggcgtca

SEQ ID NO: 195687 - DNA, 74 bp, Homo sapiens
actgagaatccctgcgttcttccaaacagccagcaggcttcttctctcttgtcttctttattggcgtcacccgg

SEQ ID NO: 195688 - DNA, 75 bp, Homo sapiens
tgcgttcttccaaacagccagcaggcttcttctctcttgtcttctttattggcgtcacccggtctctaatggatt

SEQ ID NO: 195689 - DNA, 76 bp, Homo sapiens
tcttccaaacagccagcaggcttcttctctcttgtcttctttattggcgtcacccggtctctaatggatttagcaa

SEQ ID NO: 195690 - DNA, 76 bp, Homo sapiens
agcaggcttcttctctcttgtcttctttattggcgtcacccggtctctaatggatttagcaacagctttggaatca

SEQ ID NO: 195691 - DNA, 76 bp, Homo sapiens
tctctcttgtcttctttattggcgtcacccggtctctaatggatttagcaacagctttggaatcactttcatggaa

SEQ ID NO: 195692 - DNA, 74 bp, Homo sapiens
ttgtcttctttattggcgtcacccggtctctaatggatttagcaacagctttggaatcactttcatggaagaac

SEQ ID NO: 195693 - DNA, 75 bp, Homo sapiens
ttattggcgtcacccggtctctaatggatttagcaacagctttggaatcactttcatggaagaacccagacttga

SEQ ID NO: 195694 - DNA, 73 bp, Homo sapiens
ggtctctaatggatttagcaacagctttggaatcactttcatggaagaacccagacttgacctacaaacaaaa

SEQ ID NO: 195695 - DNA, 74 bp, Homo sapiens
taatggatttagcaacagctttggaatcactttcatggaagaacccagacttgacctacaaacaaaacataata

SEQ ID NO: 195696 - DNA, 71 bp, Homo sapiens
acagctttggaatcactttcatggaagaacccagacttgacctacaaacaaaacataataagcaaactact

SEQ ID NO: 195697 - DNA, 76 bp, Homo sapiens
actctgatacaataagaggtgaggggaatagtggtatgattaacttaccatttcatatgctacttcctcaggtgta

SEQ ID NO: 195698 - DNA, 75 bp, Homo sapiens
tacaataagaggtgaggggaatagtggtatgattaacttaccatttcatatgctacttcctcaggtgtatctgtt

SEQ ID NO: 195699 - DNA, 73 bp, Homo sapiens
aggggaatagtggtatgattaacttaccatttcatatgctacttcctcaggtgtatctgtttctaagttgaaa

SEQ ID NO: 195700 - DNA, 74 bp, Homo sapiens
agtggtatgattaacttaccatttcatatgctacttcctcaggtgtatctgtttctaagttgaaactaaattca

SEQ ID NO: 195701 - DNA, 75 bp, Homo sapiens
acttaccatttcatatgctacttcctcaggtgtatctgtttctaagttgaaactaaattcaatagcttcattgtc

SEQ ID NO: 195702 - DNA, 76 bp, Homo sapiens
ccatttcatatgctacttcctcaggtgtatctgtttctaagttgaaactaaattcaatagcttcattgtctttgtg

SEQ ID NO: 195703 - DNA, 74 bp, Homo sapiens
tgctacttcctcaggtgtatctgtttctaagttgaaactaaattcaatagcttcattgtctttgtgtttgcctt

SEQ ID NO: 195704 - DNA, 71 bp, Homo sapiens
caggtgtatctgtttctaagttgaaactaaattcaatagcttcattgtctttgtgtttgcctttcaatttt

SEQ ID NO: 195705 - DNA, 69 bp, Homo sapiens
tgtttctaagttgaaactaaattcaatagcttcattgtctttgtgtttgcctttcaattttttagggtc

SEQ ID NO: 195706 - DNA, 69 bp, Homo sapiens
aactaaattcaatagcttcattgtctttgtgtttgcctttcaattttttagggtcttcaacccagagtc

SEQ ID NO: 195707 - DNA, 71 bp, Homo sapiens
attcaatagcttcattgtctttgtgtttgcctttcaattttttagggtcttcaacccagagtcttaaagca

SEQ ID NO: 195708 - DNA, 68 bp, Homo sapiens
ttgtctttgtgtttgcctttcaattttttagggtcttcaacccagagtcttaaagcaagggatgaatt

SEQ ID NO: 195709 - DNA, 72 bp, Homo sapiens
tgtttgcctttcaattttttagggtcttcaacccagagtcttaaagcaagggatgaatttgagcaatcatct

SEQ ID NO: 195710 - DNA, 74 bp, Homo sapiens
ttcaattttttagggtcttcaacccagagtcttaaagcaagggatgaatttgagcaatcatcttcttctgctaa

SEQ ID NO: 195711 - DNA, 74 bp, Homo sapiens
ttttagggtcttcaacccagagtcttaaagcaagggatgaatttgagcaatcatcttcttctgctaactccacc

SEQ ID NO: 195712 - DNA, 78 bp, Homo sapiens
ttcaacccagagtcttaaagcaagggatgaatttgagcaatcatcttcttctgctaactccaccctcagtcctgtatc

SEQ ID NO: 195713 - DNA, 78 bp, Homo sapiens
agtcttaaagcaagggatgaatttgagcaatcatcttcttctgctaactccaccctcagtcctgtatcctcagcaaaa

SEQ ID NO: 195714 - DNA, 80 bp, Homo sapiens
gatgaatttgagcaatcatcttcttctgctaactccaccctcagtcctgtatcctcagcaaaaaatgcatggtttaatag

SEQ ID NO: 195715 - DNA, 78 bp, Homo sapiens
atttgagcaatcatcttcttctgctaactccaccctcagtcctgtatcctcagcaaaaaatgcatggtttaataggtc

SEQ ID NO: 195716 - DNA, 77 bp, Homo sapiens
tcttcttctgctaactccaccctcagtcctgtatcctcagcaaaaaatgcatggtttaataggtccctgatagacaa

SEQ ID NO: 195717 - DNA, 74 bp, Homo sapiens
taactccaccctcagtcctgtatcctcagcaaaaaatgcatggtttaataggtccctgatagacaacctaataa

SEQ ID NO: 195718 - DNA, 72 bp, Homo sapiens
accctcagtcctgtatcctcagcaaaaaatgcatggtttaataggtccctgatagacaacctaataaacaaa

SEQ ID NO: 195719 - DNA, 75 bp, Homo sapiens
cctgtatcctcagcaaaaaatgcatggtttaataggtccctgatagacaacctaataaacaaaacatatatctca

SEQ ID NO: 195720 - DNA, 76 bp, Homo sapiens
gataagagaaaaatgcatctttcagttatgtcattttgctacaattgcacccacctttcagatttgttttgacgaa

SEQ ID NO: 195721 - DNA, 75 bp, Homo sapiens
aaaatgcatctttcagttatgtcattttgctacaattgcacccacctttcagatttgttttgacgaatacatcct

SEQ ID NO: 195722 - DNA, 76 bp, Homo sapiens
tcagttatgtcattttgctacaattgcacccacctttcagatttgttttgacgaatacatccttcaatgatttctt

SEQ ID NO: 195723 - DNA, 75 bp, Homo sapiens
atgtcattttgctacaattgcacccacctttcagatttgttttgacgaatacatccttcaatgatttctttgact

SEQ ID NO: 195724 - DNA, 75 bp, Homo sapiens
aattgcacccacctttcagatttgttttgacgaatacatccttcaatgatttctttgacttcaggatcagtgact

SEQ ID NO: 195725 - DNA, 75 bp, Homo sapiens
ccacctttcagatttgttttgacgaatacatccttcaatgatttctttgacttcaggatcagtgactttattgaa

SEQ ID NO: 195726 - DNA, 75 bp, Homo sapiens
atttgttttgacgaatacatccttcaatgatttctttgacttcaggatcagtgactttattgaagctggctggtt

SEQ ID NO: 195727 - DNA, 78 bp, Homo sapiens
ttgacgaatacatccttcaatgatttctttgacttcaggatcagtgactttattgaagctggctggttttatgcccta

SEQ ID NO: 195728 - DNA, 75 bp, Homo sapiens
tccttcaatgatttctttgacttcaggatcagtgactttattgaagctggctggttttatgccctaggagaaaaa

SEQ ID NO: 195729 - DNA, 71 bp, Homo sapiens
atttctttgacttcaggatcagtgactttattgaagctggctggttttatgccctaggagaaaaaaatggt

SEQ ID NO: 195730 - DNA, 72 bp, Homo sapiens
ttcaggatcagtgactttattgaagctggctggttttatgccctaggagaaaaaaatggtttctagtaacaa

SEQ ID NO: 195731 - DNA, 74 bp, Homo sapiens
tgactttattgaagctggctggttttatgccctaggagaaaaaaatggtttctagtaacaatgatgcaattgaa

SEQ ID NO: 195732 - DNA, 66 bp, Homo sapiens
catgaaacgtggcaactgataaagtaaaaagaaaaaagttatacctacactagttactttccggta

SEQ ID NO: 195733 - DNA, 69 bp, Homo sapiens
ggcaactgataaagtaaaaagaaaaaagttatacctacactagttactttccggtatatttgagctgca

SEQ ID NO: 195734 - DNA, 71 bp, Homo sapiens
agtaaaaagaaaaaagttatacctacactagttactttccggtatatttgagctgcattctgacactcaga

SEQ ID NO: 195735 - DNA, 73 bp, Homo sapiens
aaaaagttatacctacactagttactttccggtatatttgagctgcattctgacactcagaataaggatactc

SEQ ID NO: 195736 - DNA, 78 bp, Homo sapiens
tatacctacactagttactttccggtatatttgagctgcattctgacactcagaataaggatactccgatgtggccat

SEQ ID NO: 195737 - DNA, 79 bp, Homo sapiens
actagttactttccggtatatttgagctgcattctgacactcagaataaggatactccgatgtggccatttccagcata

SEQ ID NO: 195738 - DNA, 81 bp, Homo sapiens
tttccggtatatttgagctgcattctgacactcagaataaggatactccgatgtggccatttccagcatacacattccaaa

SEQ ID NO: 195739 - DNA, 84 bp, Homo sapiens
tttgagctgcattctgacactcagaataaggatactccgatgtggccatttccagcatacacattccaaaagcataaacatcta

SEQ ID NO: 195740 - DNA, 83 bp, Homo sapiens
tgacactcagaataaggatactccgatgtggccatttccagcatacacattccaaaagcataaacatctacggattcatcata

SEQ ID NO: 195741 - DNA, 79 bp, Homo sapiens
agaataaggatactccgatgtggccatttccagcatacacattccaaaagcataaacatctacggattcatcatagtgt

SEQ ID NO: 195742 - DNA, 82 bp, Homo sapiens
atactccgatgtggccatttccagcatacacattccaaaagcataaacatctacggattcatcatagtgttcttcatacatc

SEQ ID NO: 195743 - DNA, 83 bp, Homo sapiens
gccatttccagcatacacattccaaaagcataaacatctacggattcatcatagtgttcttcatacatctctggagccataaa

SEQ ID NO: 195744 - DNA, 83 bp, Homo sapiens
ttccagcatacacattccaaaagcataaacatctacggattcatcatagtgttcttcatacatctctggagccataaactcag

SEQ ID NO: 195745 - DNA, 79 bp, Homo sapiens
attccaaaagcataaacatctacggattcatcatagtgttcttcatacatctctggagccataaactcaggagttccta

SEQ ID NO: 195746 - DNA, 78 bp, Homo sapiens
ataaacatctacggattcatcatagtgttcttcatacatctctggagccataaactcaggagttcctacaaaataaca

SEQ ID NO: 195747 - DNA, 78 bp, Homo sapiens
atctacggattcatcatagtgttcttcatacatctctggagccataaactcaggagttcctacaaaataacaccacca

SEQ ID NO: 195748 - DNA, 76 bp, Homo sapiens
atagtgttcttcatacatctctggagccataaactcaggagttcctacaaaataacaccaccaccacattcttata

SEQ ID NO: 195749 - DNA, 70 bp, Homo sapiens
gaaaaatctctctttacccaaccagtaaactgtaaaactttaatcaccaatgacactcttagcaaatgag

SEQ ID NO: 195750 - DNA, 70 bp, Homo sapiens
ctttacccaaccagtaaactgtaaaactttaatcaccaatgacactcttagcaaatgaggtacgcattaa

SEQ ID NO: 195751 - DNA, 71 bp, Homo sapiens
aaccagtaaactgtaaaactttaatcaccaatgacactcttagcaaatgaggtacgcattaaggtggctaa

SEQ ID NO: 195752 - DNA, 76 bp, Homo sapiens
tgtaaaactttaatcaccaatgacactcttagcaaatgaggtacgcattaaggtggctaatcctagatcaccaatc

SEQ ID NO: 195753 - DNA, 78 bp, Homo sapiens
actttaatcaccaatgacactcttagcaaatgaggtacgcattaaggtggctaatcctagatcaccaatcttcacaga

SEQ ID NO: 195754 - DNA, 78 bp, Homo sapiens
aatgacactcttagcaaatgaggtacgcattaaggtggctaatcctagatcaccaatcttcacagatccagtgggtcc

SEQ ID NO: 195755 - DNA, 78 bp, Homo sapiens
gcaaatgaggtacgcattaaggtggctaatcctagatcaccaatcttcacagatccagtgggtcccgtgatgaaaata

SEQ ID NO: 195756 - DNA, 77 bp, Homo sapiens
aggtacgcattaaggtggctaatcctagatcaccaatcttcacagatccagtgggtcccgtgatgaaaatattgtca

SEQ ID NO: 195757 - DNA, 78 bp, Homo sapiens
attaaggtggctaatcctagatcaccaatcttcacagatccagtgggtcccgtgatgaaaatattgtcacacttcaga

SEQ ID NO: 195758 - DNA, 79 bp, Homo sapiens
tcctagatcaccaatcttcacagatccagtgggtcccgtgatgaaaatattgtcacacttcagatcccggtgaataata

SEQ ID NO: 195759 - DNA, 77 bp, Homo sapiens
atcaccaatcttcacagatccagtgggtcccgtgatgaaaatattgtcacacttcagatcccggtgaataataggag

SEQ ID NO: 195760 - DNA, 76 bp, Homo sapiens
ttcacagatccagtgggtcccgtgatgaaaatattgtcacacttcagatcccggtgaataataggaggagtcctag

SEQ ID NO: 195761 - DNA, 75 bp, Homo sapiens
agtgggtcccgtgatgaaaatattgtcacacttcagatcccggtgaataataggaggagtcctagtgtgcaagaa

SEQ ID NO: 195762 - DNA, 75 bp, Homo sapiens
tgaaaatattgtcacacttcagatcccggtgaataataggaggagtcctagtgtgcaagaactgcaaccccttta

SEQ ID NO: 195763 - DNA, 73 bp, Homo sapiens
atattgtcacacttcagatcccggtgaataataggaggagtcctagtgtgcaagaactgcaacccctttaaaa

SEQ ID NO: 195764 - DNA, 73 bp, Homo sapiens
acttcagatcccggtgaataataggaggagtcctagtgtgcaagaactgcaacccctttaaaatttgcctgca

SEQ ID NO: 195765 - DNA, 74 bp, Homo sapiens
tgaataataggaggagtcctagtgtgcaagaactgcaacccctttaaaatttgcctgcaccagctccttaagac

SEQ ID NO: 195766 - DNA, 71 bp, Homo sapiens
ataggaggagtcctagtgtgcaagaactgcaacccctttaaaatttgcctgcaccagctccttaagacctt

SEQ ID NO: 195767 - DNA, 72 bp, Homo sapiens
tagtgtgcaagaactgcaacccctttaaaatttgcctgcaccagctccttaagacctttggtttcatgactt

SEQ ID NO: 195768 - DNA, 68 bp, Homo sapiens
aagaactgcaacccctttaaaatttgcctgcaccagctccttaagacctttggtttcatgactttaaa

SEQ ID NO: 195769 - DNA, 67 bp, Homo sapiens
ctttaaaatttgcctgcaccagctccttaagacctttggtttcatgactttaaatcgttttaagtac

SEQ ID NO: 195770 - DNA, 69 bp, Homo sapiens
aaatttgcctgcaccagctccttaagacctttggtttcatgactttaaatcgttttaagtacctataca

SEQ ID NO: 195771 - DNA, 68 bp, Homo sapiens
gcaccagctccttaagacctttggtttcatgactttaaatcgttttaagtacctatacaaagaaacaa

SEQ ID NO: 195772 - DNA, 66 bp, Homo sapiens
aagacctttggtttcatgactttaaatcgttttaagtacctatacaaagaaacaaaagaccatgtg

SEQ ID NO: 195773 - DNA, 71 bp, Homo sapiens
attatttccaaataaaactacattggcactatcagggtcaacttacgtctttaaggtcccagatgtcatta

SEQ ID NO: 195774 - DNA, 72 bp, Homo sapiens
aaataaaactacattggcactatcagggtcaacttacgtctttaaggtcccagatgtcattagttcagtcac

SEQ ID NO: 195775 - DNA, 76 bp, Homo sapiens
tacattggcactatcagggtcaacttacgtctttaaggtcccagatgtcattagttcagtcactaatacaatacat

SEQ ID NO: 195776 - DNA, 72 bp, Homo sapiens
actatcagggtcaacttacgtctttaaggtcccagatgtcattagttcagtcactaatacaatacatttctt

SEQ ID NO: 195777 - DNA, 70 bp, Homo sapiens
ggtcaacttacgtctttaaggtcccagatgtcattagttcagtcactaatacaatacatttctttccttt

SEQ ID NO: 195778 - DNA, 73 bp, Homo sapiens
ttaaggtcccagatgtcattagttcagtcactaatacaatacatttctttccttttaatatagattcccagga

SEQ ID NO: 195779 - DNA, 75 bp, Homo sapiens
gtcccagatgtcattagttcagtcactaatacaatacatttctttccttttaatatagattcccaggaatcataa

SEQ ID NO: 195780 - DNA, 73 bp, Homo sapiens
tcattagttcagtcactaatacaatacatttctttccttttaatatagattcccaggaatcataaaatcgaac

SEQ ID NO: 195781 - DNA, 71 bp, Homo sapiens
gtcactaatacaatacatttctttccttttaatatagattcccaggaatcataaaatcgaactatattggg

SEQ ID NO: 195782 - DNA, 71 bp, Homo sapiens
atacatttctttccttttaatatagattcccaggaatcataaaatcgaactatattggggtgctggagacc

SEQ ID NO: 195783 - DNA, 73 bp, Homo sapiens
ttccttttaatatagattcccaggaatcataaaatcgaactatattggggtgctggagacccttcaacatctc

SEQ ID NO: 195784 - DNA, 76 bp, Homo sapiens
taatatagattcccaggaatcataaaatcgaactatattggggtgctggagacccttcaacatctctgcttcttcc

SEQ ID NO: 195785 - DNA, 75 bp, Homo sapiens
tcccaggaatcataaaatcgaactatattggggtgctggagacccttcaacatctctgcttcttccttgaatctt

SEQ ID NO: 195786 - DNA, 77 bp, Homo sapiens
ataaaatcgaactatattggggtgctggagacccttcaacatctctgcttcttccttgaatctttgctgctcagctt

SEQ ID NO: 195787 - DNA, 76 bp, Homo sapiens
aactatattggggtgctggagacccttcaacatctctgcttcttccttgaatctttgctgctcagctttggttaac

SEQ ID NO: 195788 - DNA, 75 bp, Homo sapiens
ctggagacccttcaacatctctgcttcttccttgaatctttgctgctcagctttggttaactttcggtcctgaaa

SEQ ID NO: 195789 - DNA, 75 bp, Homo sapiens
ttcaacatctctgcttcttccttgaatctttgctgctcagctttggttaactttcggtcctgaaaaggaataaca

SEQ ID NO: 195790 - DNA, 72 bp, Homo sapiens
ctgcttcttccttgaatctttgctgctcagctttggttaactttcggtcctgaaaaggaataacaagttcca

SEQ ID NO: 195791 - DNA, 69 bp, Homo sapiens
cttgaatctttgctgctcagctttggttaactttcggtcctgaaaaggaataacaagttccaaaataaa

SEQ ID NO: 195792 - DNA, 74 bp, Homo sapiens
cagctaaaacttgaatttattataaccaagaagattatatacctacctgcagctcacaccaagcaacctcaacc

SEQ ID NO: 195793 - DNA, 73 bp, Homo sapiens
aacttgaatttattataaccaagaagattatatacctacctgcagctcacaccaagcaacctcaacccatgtt

SEQ ID NO: 195794 - DNA, 76 bp, Homo sapiens
tttattataaccaagaagattatatacctacctgcagctcacaccaagcaacctcaacccatgtttcagtgtccag

SEQ ID NO: 195795 - DNA, 76 bp, Homo sapiens
aagaagattatatacctacctgcagctcacaccaagcaacctcaacccatgtttcagtgtccagtcctttatatac

SEQ ID NO: 195796 - DNA, 76 bp, Homo sapiens
tatatacctacctgcagctcacaccaagcaacctcaacccatgtttcagtgtccagtcctttatatactgttttaa

SEQ ID NO: 195797 - DNA, 74 bp, Homo sapiens
agctcacaccaagcaacctcaacccatgtttcagtgtccagtcctttatatactgttttaaatgctcctcttcc

SEQ ID NO: 195798 - DNA, 72 bp, Homo sapiens
aagcaacctcaacccatgtttcagtgtccagtcctttatatactgttttaaatgctcctcttcctagttcta

SEQ ID NO: 195799 - DNA, 71 bp, Homo sapiens
aacccatgtttcagtgtccagtcctttatatactgttttaaatgctcctcttcctagttctatgtcaaatt

SEQ ID NO: 195800 - DNA, 74 bp, Homo sapiens
tgtttcagtgtccagtcctttatatactgttttaaatgctcctcttcctagttctatgtcaaatttcaggaatc

SEQ ID NO: 195801 - DNA, 74 bp, Homo sapiens
gtcctttatatactgttttaaatgctcctcttcctagttctatgtcaaatttcaggaatctgccactaggagaa

SEQ ID NO: 195802 - DNA, 76 bp, Homo sapiens
ttatatactgttttaaatgctcctcttcctagttctatgtcaaatttcaggaatctgccactaggagaagtagcta

SEQ ID NO: 195803 - DNA, 76 bp, Homo sapiens
tttaaatgctcctcttcctagttctatgtcaaatttcaggaatctgccactaggagaagtagctacagccttcatt

SEQ ID NO: 195804 - DNA, 77 bp, Homo sapiens
ctcttcctagttctatgtcaaatttcaggaatctgccactaggagaagtagctacagccttcatttctgcttcttct

SEQ ID NO: 195805 - DNA, 77 bp, Homo sapiens
agttctatgtcaaatttcaggaatctgccactaggagaagtagctacagccttcatttctgcttcttcttccatttc

SEQ ID NO: 195806 - DNA, 74 bp, Homo sapiens
aaatttcaggaatctgccactaggagaagtagctacagccttcatttctgcttcttcttccatttccttttcat

SEQ ID NO: 195807 - DNA, 73 bp, Homo sapiens
aatctgccactaggagaagtagctacagccttcatttctgcttcttcttccatttccttttcatttttctcct

SEQ ID NO: 195808 - DNA, 71 bp, Homo sapiens
agaagtagctacagccttcatttctgcttcttcttccatttccttttcatttttctccttgaaacaatctt

SEQ ID NO: 195809 - DNA, 72 bp, Homo sapiens
agctacagccttcatttctgcttcttcttccatttccttttcatttttctccttgaaacaatcttttgagat

SEQ ID NO: 195810 - DNA, 71 bp, Homo sapiens
tttctgcttcttcttccatttccttttcatttttctccttgaaacaatcttttgagatttctgaggttgac

SEQ ID NO: 195811 - DNA, 71 bp, Homo sapiens
gcttcttcttccatttccttttcatttttctccttgaaacaatcttttgagatttctgaggttgactttga

SEQ ID NO: 195812 - DNA, 72 bp, Homo sapiens
tccttttcatttttctccttgaaacaatcttttgagatttctgaggttgactttgaacactgttcatattta

SEQ ID NO: 195813 - DNA, 72 bp, Homo sapiens
ttttctccttgaaacaatcttttgagatttctgaggttgactttgaacactgttcatatttaacttcttgtc

SEQ ID NO: 195814 - DNA, 75 bp, Homo sapiens
tgaaacaatcttttgagatttctgaggttgactttgaacactgttcatatttaacttcttgtccacctctcaaca

SEQ ID NO: 195815 - DNA, 74 bp, Homo sapiens
ttttgagatttctgaggttgactttgaacactgttcatatttaacttcttgtccacctctcaacacatttgaag

SEQ ID NO: 195816 - DNA, 74 bp, Homo sapiens
tttctgaggttgactttgaacactgttcatatttaacttcttgtccacctctcaacacatttgaaggaagctta

SEQ ID NO: 195817 - DNA, 74 bp, Homo sapiens
ctttgaacactgttcatatttaacttcttgtccacctctcaacacatttgaaggaagcttatctactcttggaa

SEQ ID NO: 195818 - DNA, 76 bp, Homo sapiens
atatttaacttcttgtccacctctcaacacatttgaaggaagcttatctactcttggaatattcattgcagcctta

SEQ ID NO: 195819 - DNA, 79 bp, Homo sapiens
tcttgtccacctctcaacacatttgaaggaagcttatctactcttggaatattcattgcagccttaattctctcatctt

SEQ ID NO: 195820 - DNA, 77 bp, Homo sapiens
aacacatttgaaggaagcttatctactcttggaatattcattgcagccttaattctctcatctttgggggatgattc

SEQ ID NO: 195821 - DNA, 78 bp, Homo sapiens
agcttatctactcttggaatattcattgcagccttaattctctcatctttgggggatgattcggcaactttgtcatct

SEQ ID NO: 195822 - DNA, 78 bp, Homo sapiens
ttggaatattcattgcagccttaattctctcatctttgggggatgattcggcaactttgtcatcttccgtcatttcaa

SEQ ID NO: 195823 - DNA, 76 bp, Homo sapiens
attgcagccttaattctctcatctttgggggatgattcggcaactttgtcatcttccgtcatttcaacactctttc

SEQ ID NO: 195824 - DNA, 72 bp, Homo sapiens
aattctctcatctttgggggatgattcggcaactttgtcatcttccgtcatttcaacactctttcggaaaaa

SEQ ID NO: 195825 - DNA, 70 bp, Homo sapiens
tcggcaactttgtcatcttccgtcatttcaacactctttcggaaaaatctcttcctttctacagtttccc

SEQ ID NO: 195826 - DNA, 73 bp, Homo sapiens
tgtcatcttccgtcatttcaacactctttcggaaaaatctcttcctttctacagtttccccagaagcagagaa

SEQ ID NO: 195827 - DNA, 68 bp, Homo sapiens
tttcaacactctttcggaaaaatctcttcctttctacagtttccccagaagcagagaaggtactgttt

SEQ ID NO: 195828 - DNA, 67 bp, Homo sapiens
tctttcggaaaaatctcttcctttctacagtttccccagaagcagagaaggtactgtttttctcctt

SEQ ID NO: 195829 - DNA, 70 bp, Homo sapiens
aatctcttcctttctacagtttccccagaagcagagaaggtactgtttttctcctttagtctagcttcta

SEQ ID NO: 195830 - DNA, 70 bp, Homo sapiens
tttctacagtttccccagaagcagagaaggtactgtttttctcctttagtctagcttctactgtcaaagt

SEQ ID NO: 195831 - DNA, 73 bp, Homo sapiens
acagtttccccagaagcagagaaggtactgtttttctcctttagtctagcttctactgtcaaagttgcagcga

SEQ ID NO: 195832 - DNA, 72 bp, Homo sapiens
aagcagagaaggtactgtttttctcctttagtctagcttctactgtcaaagttgcagcgacctggggaactc

SEQ ID NO: 195833 - DNA, 71 bp, Homo sapiens
tttttctcctttagtctagcttctactgtcaaagttgcagcgacctggggaactctgttttcaaatgaaat

SEQ ID NO: 195834 - DNA, 74 bp, Homo sapiens
ttagtctagcttctactgtcaaagttgcagcgacctggggaactctgttttcaaatgaaattccatcaggtttc

SEQ ID NO: 195835 - DNA, 75 bp, Homo sapiens
ttctactgtcaaagttgcagcgacctggggaactctgttttcaaatgaaattccatcaggtttctcagaatcttc

SEQ ID NO: 195836 - DNA, 76 bp, Homo sapiens
aaagttgcagcgacctggggaactctgttttcaaatgaaattccatcaggtttctcagaatcttctgtgctggctg

SEQ ID NO: 195837 - DNA, 75 bp, Homo sapiens
acctggggaactctgttttcaaatgaaattccatcaggtttctcagaatcttctgtgctggctggatcccctgaa

SEQ ID NO: 195838 - DNA, 77 bp, Homo sapiens
aatgaaattccatcaggtttctcagaatcttctgtgctggctggatcccctgaatcagtggccattgtaattaaagt

SEQ ID NO: 195839 - DNA, 77 bp, Homo sapiens
tcaggtttctcagaatcttctgtgctggctggatcccctgaatcagtggccattgtaattaaagttggcactaaaat

SEQ ID NO: 195840 - DNA, 75 bp, Homo sapiens
tttctcagaatcttctgtgctggctggatcccctgaatcagtggccattgtaattaaagttggcactaaaatttt

SEQ ID NO: 195841 - DNA, 74 bp, Homo sapiens
tcttctgtgctggctggatcccctgaatcagtggccattgtaattaaagttggcactaaaatttttcctgtttc

SEQ ID NO: 195842 - DNA, 71 bp, Homo sapiens
aatcagtggccattgtaattaaagttggcactaaaatttttcctgtttctactcttcagtccagttacatc

SEQ ID NO: 195843 - DNA, 72 bp, Homo sapiens
ccattgtaattaaagttggcactaaaatttttcctgtttctactcttcagtccagttacatctcaggtatca

SEQ ID NO: 195844 - DNA, 73 bp, Homo sapiens
aaagttggcactaaaatttttcctgtttctactcttcagtccagttacatctcaggtatcagaattatcagaa

SEQ ID NO: 195845 - DNA, 73 bp, Homo sapiens
ctaaaatttttcctgtttctactcttcagtccagttacatctcaggtatcagaattatcagaatggacttcct

SEQ ID NO: 195846 - DNA, 75 bp, Homo sapiens
tttttcctgtttctactcttcagtccagttacatctcaggtatcagaattatcagaatggacttccttttgcgtg

SEQ ID NO: 195847 - DNA, 78 bp, Homo sapiens
tttctactcttcagtccagttacatctcaggtatcagaattatcagaatggacttccttttgcgtggtcatgtatttc

SEQ ID NO: 195848 - DNA, 73 bp, Homo sapiens
tatcagaattatcagaatggacttccttttgcgtggtcatgtatttccatagcaacctgaagggggggaaaaa

SEQ ID NO: 195849 - DNA, 71 bp, Homo sapiens
tatcagaatggacttccttttgcgtggtcatgtatttccatagcaacctgaagggggggaaaaagatattt

SEQ ID NO: 195850 - DNA, 68 bp, Homo sapiens
acttccttttgcgtggtcatgtatttccatagcaacctgaagggggggaaaaagatattttaaaatca

SEQ ID NO: 195851 - DNA, 71 bp, Homo sapiens
gcctcctccctctctcctagcgccccggccggcccgggaccctcaccagattagaggctctcgcaaaggaa

SEQ ID NO: 195852 - DNA, 72 bp, Homo sapiens
ctctctcctagcgccccggccggcccgggaccctcaccagattagaggctctcgcaaaggaagactctctta

SEQ ID NO: 195853 - DNA, 70 bp, Homo sapiens
tagcgccccggccggcccgggaccctcaccagattagaggctctcgcaaaggaagactctcttactcttt

SEQ ID NO: 195854 - DNA, 71 bp, Homo sapiens
cggcccgggaccctcaccagattagaggctctcgcaaaggaagactctcttactcttttcgcttctccctc

SEQ ID NO: 195855 - DNA, 74 bp, Homo sapiens
accctcaccagattagaggctctcgcaaaggaagactctcttactcttttcgcttctccctcgccctctctcga

SEQ ID NO: 195856 - DNA, 75 bp, Homo sapiens
agattagaggctctcgcaaaggaagactctcttactcttttcgcttctccctcgccctctctcgagcctcctctc

SEQ ID NO: 195857 - DNA, 74 bp, Homo sapiens
tcgcaaaggaagactctcttactcttttcgcttctccctcgccctctctcgagcctcctctcgccccacgacga

SEQ ID NO: 195858 - DNA, 74 bp, Homo sapiens
tcttactcttttcgcttctccctcgccctctctcgagcctcctctcgccccacgacgagccacaccgtagaata

SEQ ID NO: 195859 - DNA, 77 bp, Homo sapiens
tttcgcttctccctcgccctctctcgagcctcctctcgccccacgacgagccacaccgtagaatagacacatacaca

SEQ ID NO: 195860 - DNA, 79 bp, Homo sapiens
atacacacacaccgcctcctcctcgatcgcctcctccgatgcttcttactcctctcctcgatgtctcgagctccgctcc

SEQ ID NO: 195861 - DNA, 77 bp, Homo sapiens
accgcctcctcctcgatcgcctcctccgatgcttcttactcctctcctcgatgtctcgagctccgctccgcgtcgtg

SEQ ID NO: 195862 - DNA, 81 bp, Homo sapiens
ctcctcctcgatcgcctcctccgatgcttcttactcctctcctcgatgtctcgagctccgctccgcgtcgtgtgcgcttgc

SEQ ID NO: 195863 - DNA, 82 bp, Homo sapiens
atcgcctcctccgatgcttcttactcctctcctcgatgtctcgagctccgctccgcgtcgtgtgcgcttgcgcgcgcgagcg

SEQ ID NO: 195864 - DNA, 82 bp, Homo sapiens
cgatgcttcttactcctctcctcgatgtctcgagctccgctccgcgtcgtgtgcgcttgcgcgcgcgagcgtctccccgcga

SEQ ID NO: 195865 - DNA, 80 bp, Homo sapiens
ttactcctctcctcgatgtctcgagctccgctccgcgtcgtgtgcgcttgcgcgcgcgagcgtctccccgcgagcccacc

SEQ ID NO: 195866 - DNA, 80 bp, Homo sapiens
cctcgatgtctcgagctccgctccgcgtcgtgtgcgcttgcgcgcgcgagcgtctccccgcgagcccaccgggccagcta

SEQ ID NO: 195867 - DNA, 76 bp, Homo sapiens
agctccgctccgcgtcgtgtgcgcttgcgcgcgcgagcgtctccccgcgagcccaccgggccagctacggccggta

SEQ ID NO: 195868 - DNA, 74 bp, Homo sapiens
tccgcgtcgtgtgcgcttgcgcgcgcgagcgtctccccgcgagcccaccgggccagctacggccggtaggtaaa

SEQ ID NO: 195869 - DNA, 73 bp, Homo sapiens
gcttgcgcgcgcgagcgtctccccgcgagcccaccgggccagctacggccggtaggtaaagagcgggcggaga

SEQ ID NO: 195870 - DNA, 69 bp, Homo sapiens
cgcgagcgtctccccgcgagcccaccgggccagctacggccggtaggtaaagagcgggcggagagaggg

SEQ ID NO: 195871 - DNA, 68 bp, Homo sapiens
cgtctccccgcgagcccaccgggccagctacggccggtaggtaaagagcgggcggagagaggggagcg

SEQ ID NO: 195872 - DNA, 67 bp, Homo sapiens
ccaccgggccagctacggccggtaggtaaagagcgggcggagagaggggagcggggtacgagcccaa

SEQ ID NO: 195873 - DNA, 70 bp, Homo sapiens
ccagctacggccggtaggtaaagagcgggcggagagaggggagcggggtacgagcccaagctcgcgctcg

SEQ ID NO: 195874 - DNA, 71 bp, Homo sapiens
cggtaggtaaagagcgggcggagagaggggagcggggtacgagcccaagctcgcgctcggcccggagctga

SEQ ID NO: 195875 - DNA, 75 bp, Homo sapiens
gtaaagagcgggcggagagaggggagcggggtacgagcccaagctcgcgctcggcccggagctgagcagacgcac

SEQ ID NO: 195876 - DNA, 76 bp, Homo sapiens
agagaggggagcggggtacgagcccaagctcgcgctcggcccggagctgagcagacgcacgcgtactccagccagg

SEQ ID NO: 195877 - DNA, 76 bp, Homo sapiens
agcggggtacgagcccaagctcgcgctcggcccggagctgagcagacgcacgcgtactccagccagggaattcgga

SEQ ID NO: 195878 - DNA, 71 bp, Homo sapiens
cagacacaaaattttatatccaaaaatgatcaagcgaggtcaacggtaaaaatgttagaaagttgcagcct

SEQ ID NO: 195879 - DNA, 69 bp, Homo sapiens
tttatatccaaaaatgatcaagcgaggtcaacggtaaaaatgttagaaagttgcagcctttttatttgg

SEQ ID NO: 195880 - DNA, 68 bp, Homo sapiens
aaaaatgatcaagcgaggtcaacggtaaaaatgttagaaagttgcagcctttttatttggtacccaga

SEQ ID NO: 195881 - DNA, 69 bp, Homo sapiens
aagcgaggtcaacggtaaaaatgttagaaagttgcagcctttttatttggtacccagagaatgccagta

SEQ ID NO: 195882 - DNA, 68 bp, Homo sapiens
ggtcaacggtaaaaatgttagaaagttgcagcctttttatttggtacccagagaatgccagtaattta

SEQ ID NO: 195883 - DNA, 72 bp, Homo sapiens
aatgttagaaagttgcagcctttttatttggtacccagagaatgccagtaatttaacatatcttgagaactg

SEQ ID NO: 195884 - DNA, 75 bp, Homo sapiens
aaagttgcagcctttttatttggtacccagagaatgccagtaatttaacatatcttgagaactgttgctcacaga

SEQ ID NO: 195885 - DNA, 72 bp, Homo sapiens
cctttttatttggtacccagagaatgccagtaatttaacatatcttgagaactgttgctcacagagttttaa

SEQ ID NO: 195886 - DNA, 74 bp, Homo sapiens
ttggtacccagagaatgccagtaatttaacatatcttgagaactgttgctcacagagttttaacaagaacaaaa

SEQ ID NO: 195887 - DNA, 74 bp, Homo sapiens
gagaatgccagtaatttaacatatcttgagaactgttgctcacagagttttaacaagaacaaaaataaatataa

SEQ ID NO: 195888 - DNA, 73 bp, Homo sapiens
tttaacatatcttgagaactgttgctcacagagttttaacaagaacaaaaataaatataacttctatgtcttc

SEQ ID NO: 195889 - DNA, 73 bp, Homo sapiens
cttgagaactgttgctcacagagttttaacaagaacaaaaataaatataacttctatgtcttctttggcatgt

SEQ ID NO: 195890 - DNA, 73 bp, Homo sapiens
gttgctcacagagttttaacaagaacaaaaataaatataacttctatgtcttctttggcatgttgtaaattca

SEQ ID NO: 195891 - DNA, 72 bp, Homo sapiens
caagaacaaaaataaatataacttctatgtcttctttggcatgttgtaaattcaaaatgatagccatttctt

SEQ ID NO: 195892 - DNA, 79 bp, Homo sapiens
taaatataacttctatgtcttctttggcatgttgtaaattcaaaatgatagccatttctttagcagcattgtgagagaa

SEQ ID NO: 195893 - DNA, 78 bp, Homo sapiens
acttctatgtcttctttggcatgttgtaaattcaaaatgatagccatttctttagcagcattgtgagagaaagaaaca

SEQ ID NO: 195894 - DNA, 77 bp, Homo sapiens
gtcttctttggcatgttgtaaattcaaaatgatagccatttctttagcagcattgtgagagaaagaaacattgtaaa

SEQ ID NO: 195895 - DNA, 77 bp, Homo sapiens
ggcatgttgtaaattcaaaatgatagccatttctttagcagcattgtgagagaaagaaacattgtaaaatgaactac

SEQ ID NO: 195896 - DNA, 76 bp, Homo sapiens
ttcaaaatgatagccatttctttagcagcattgtgagagaaagaaacattgtaaaatgaactactggatttggtct

SEQ ID NO: 195897 - DNA, 78 bp, Homo sapiens
gatagccatttctttagcagcattgtgagagaaagaaacattgtaaaatgaactactggatttggtcttacatgataa

SEQ ID NO: 195898 - DNA, 73 bp, Homo sapiens
ctttagcagcattgtgagagaaagaaacattgtaaaatgaactactggatttggtcttacatgataaaaaact

SEQ ID NO: 195899 - DNA, 73 bp, Homo sapiens
gcattgtgagagaaagaaacattgtaaaatgaactactggatttggtcttacatgataaaaaacttagtataa

SEQ ID NO: 195900 - DNA, 68 bp, Homo sapiens
attgtaaaatgaactactggatttggtcttacatgataaaaaacttagtataataaatgaaaatttta

SEQ ID NO: 195901 - DNA, 68 bp, Homo sapiens
gaactactggatttggtcttacatgataaaaaacttagtataataaatgaaaattttaatgtcaaaaa

SEQ ID NO: 195902 - DNA, 65 bp, Homo sapiens
acatgataaaaaacttagtataataaatgaaaattttaatgtcaaaaaaccaatggtttaaagaa

SEQ ID NO: 195903 - DNA, 63 bp, Homo sapiens
aaacttagtataataaatgaaaattttaatgtcaaaaaaccaatggtttaaagaaaacattaa

SEQ ID NO: 195904 - DNA, 63 bp, Homo sapiens
aatgaaaattttaatgtcaaaaaaccaatggtttaaagaaaacattaataaaataaatggtaa

SEQ ID NO: 195905 - DNA, 66 bp, Homo sapiens
ttaatgtcaaaaaaccaatggtttaaagaaaacattaataaaataaatggtaacataaaattcata

SEQ ID NO: 195906 - DNA, 69 bp, Homo sapiens
caatggtttaaagaaaacattaataaaataaatggtaacataaaattcataatatagtcagaacaataa

SEQ ID NO: 195907 - DNA, 69 bp, Homo sapiens
aacattaataaaataaatggtaacataaaattcataatatagtcagaacaataaaatagtttttgaaca

SEQ ID NO: 195908 - DNA, 72 bp, Homo sapiens
gtaacataaaattcataatatagtcagaacaataaaatagtttttgaacactggggattgtttaactgcagc

SEQ ID NO: 195909 - DNA, 71 bp, Homo sapiens
ttcataatatagtcagaacaataaaatagtttttgaacactggggattgtttaactgcagctttgaagttt

SEQ ID NO: 195910 - DNA, 69 bp, Homo sapiens
tatagtcagaacaataaaatagtttttgaacactggggattgtttaactgcagctttgaagtttttaag

SEQ ID NO: 195911 - DNA, 67 bp, Homo sapiens
gaacaataaaatagtttttgaacactggggattgtttaactgcagctttgaagtttttaagtacacg

SEQ ID NO: 195912 - DNA, 69 bp, Homo sapiens
gtttttgaacactggggattgtttaactgcagctttgaagtttttaagtacacgtaaatcaaattcaca

SEQ ID NO: 195913 - DNA, 69 bp, Homo sapiens
acactggggattgtttaactgcagctttgaagtttttaagtacacgtaaatcaaattcacacacaactt

SEQ ID NO: 195914 - DNA, 71 bp, Homo sapiens
tgtttaactgcagctttgaagtttttaagtacacgtaaatcaaattcacacacaacttttatttaatgcca

SEQ ID NO: 195915 - DNA, 71 bp, Homo sapiens
gcagctttgaagtttttaagtacacgtaaatcaaattcacacacaacttttatttaatgccatttcagtct

SEQ ID NO: 195916 - DNA, 72 bp, Homo sapiens
agtttttaagtacacgtaaatcaaattcacacacaacttttatttaatgccatttcagtcttcagaaatgca

SEQ ID NO: 195917 - DNA, 77 bp, Homo sapiens
gtacacgtaaatcaaattcacacacaacttttatttaatgccatttcagtcttcagaaatgcaatgaaatgtcagta

SEQ ID NO: 195918 - DNA, 71 bp, Homo sapiens
acatatatatttaatatcagaaataagtttaggaattcaaaagtgcttgggatgtgttggcaaaccaattt

SEQ ID NO: 195919 - DNA, 69 bp, Homo sapiens
atatttaatatcagaaataagtttaggaattcaaaagtgcttgggatgtgttggcaaaccaatttttta

SEQ ID NO: 195920 - DNA, 72 bp, Homo sapiens
ttttaaaaaatgtggctatagcaaactgtggttgcttcataaagcctatgtaactcccaactaccaacagta

SEQ ID NO: 195921 - DNA, 72 bp, Homo sapiens
aaaaatgtggctatagcaaactgtggttgcttcataaagcctatgtaactcccaactaccaacagtacttcc

SEQ ID NO: 195922 - DNA, 72 bp, Homo sapiens
tggctatagcaaactgtggttgcttcataaagcctatgtaactcccaactaccaacagtacttcctgttttt

SEQ ID NO: 195923 - DNA, 70 bp, Homo sapiens
ctatagcaaactgtggttgcttcataaagcctatgtaactcccaactaccaacagtacttcctgtttttt

SEQ ID NO: 195924 - DNA, 67 bp, Homo sapiens
caaactgtggttgcttcataaagcctatgtaactcccaactaccaacagtacttcctgttttttttt

SEQ ID NO: 195925 - DNA, 65 bp, Homo sapiens
tttttttttatcaaacagaaaaaccaccttctccttttttttgtactatggaatttaatgcaaga

SEQ ID NO: 195926 - DNA, 67 bp, Homo sapiens
tcaaacagaaaaaccaccttctccttttttttgtactatggaatttaatgcaagataaattctaact

SEQ ID NO: 195927 - DNA, 66 bp, Homo sapiens
aaaccaccttctccttttttttgtactatggaatttaatgcaagataaattctaacttacaaacca

SEQ ID NO: 195928 - DNA, 70 bp, Homo sapiens
ctccttttttttgtactatggaatttaatgcaagataaattctaacttacaaaccatgctggaatttgga

SEQ ID NO: 195929 - DNA, 71 bp, Homo sapiens
ttttgtactatggaatttaatgcaagataaattctaacttacaaaccatgctggaatttggatatttaagg

SEQ ID NO: 195930 - DNA, 71 bp, Homo sapiens
ctatggaatttaatgcaagataaattctaacttacaaaccatgctggaatttggatatttaaggtttaatg

SEQ ID NO: 195931 - DNA, 69 bp, Homo sapiens
atgcaagataaattctaacttacaaaccatgctggaatttggatatttaaggtttaatgtgtaactttt

SEQ ID NO: 195932 - DNA, 68 bp, Homo sapiens
attctaacttacaaaccatgctggaatttggatatttaaggtttaatgtgtaactttttaaatggctg

SEQ ID NO: 195933 - DNA, 67 bp, Homo sapiens
cttacaaaccatgctggaatttggatatttaaggtttaatgtgtaactttttaaatggctgtttctt

SEQ ID NO: 195934 - DNA, 72 bp, Homo sapiens
cactgtgcccggccggctgtttcttgatagactgctttcctgctgttaaaaataattttatcatactaaaaa

SEQ ID NO: 195935 - DNA, 69 bp, Homo sapiens
cccggccggctgtttcttgatagactgctttcctgctgttaaaaataattttatcatactaaaaaacaa

SEQ ID NO: 195936 - DNA, 72 bp, Homo sapiens
aataattttatcatactaaaaaacaaaacactacatatttgttataagcagcaatttcagagagaatgaatt

SEQ ID NO: 195937 - DNA, 74 bp, Homo sapiens
atcatactaaaaaacaaaacactacatatttgttataagcagcaatttcagagagaatgaatttggaaagagaa

SEQ ID NO: 195938 - DNA, 71 bp, Homo sapiens
aaaaacaaaacactacatatttgttataagcagcaatttcagagagaatgaatttggaaagagaaagaaaa

SEQ ID NO: 195939 - DNA, 78 bp, Homo sapiens
tatttgttataagcagcaatttcagagagaatgaatttggaaagagaaagaaaatgtgacctgagcaatattagttca

SEQ ID NO: 195940 - DNA, 78 bp, Homo sapiens
taagcagcaatttcagagagaatgaatttggaaagagaaagaaaatgtgacctgagcaatattagttcataggaaaga

SEQ ID NO: 195941 - DNA, 73 bp, Homo sapiens
tttggaaagagaaagaaaatgtgacctgagcaatattagttcataggaaagataaaagtaacctaatcagtca

SEQ ID NO: 195942 - DNA, 74 bp, Homo sapiens
gaaagaaaatgtgacctgagcaatattagttcataggaaagataaaagtaacctaatcagtcacattttgacaa

SEQ ID NO: 195943 - DNA, 72 bp, Homo sapiens
aaaatgtgacctgagcaatattagttcataggaaagataaaagtaacctaatcagtcacattttgacaattt

SEQ ID NO: 195944 - DNA, 71 bp, Homo sapiens
ctgagcaatattagttcataggaaagataaaagtaacctaatcagtcacattttgacaattttttaataaa

SEQ ID NO: 195945 - DNA, 70 bp, Homo sapiens
gttcataggaaagataaaagtaacctaatcagtcacattttgacaattttttaataaacgaatgcagtta

SEQ ID NO: 195946 - DNA, 70 bp, Homo sapiens
aagataaaagtaacctaatcagtcacattttgacaattttttaataaacgaatgcagttagtacattctc

SEQ ID NO: 195947 - DNA, 72 bp, Homo sapiens
acctaatcagtcacattttgacaattttttaataaacgaatgcagttagtacattctctataattgtccacg

SEQ ID NO: 195948 - DNA, 72 bp, Homo sapiens
tcagtcacattttgacaattttttaataaacgaatgcagttagtacattctctataattgtccacgtaaaat

SEQ ID NO: 195949 - DNA, 69 bp, Homo sapiens
gtacattctctataattgtccacgtaaaattaaatgcttaataccttttgaagaataaattattagttc

SEQ ID NO: 195950 - DNA, 68 bp, Homo sapiens
ctctataattgtccacgtaaaattaaatgcttaataccttttgaagaataaattattagttcccataa

SEQ ID NO: 195951 - DNA, 67 bp, Homo sapiens
gtccacgtaaaattaaatgcttaataccttttgaagaataaattattagttcccataactagacagt

SEQ ID NO: 195952 - DNA, 75 bp, Homo sapiens
agaataaattattagttcccataactagacagttggaattacagcaaaacagtcatccacagaagctctattgtc

SEQ ID NO: 195953 - DNA, 75 bp, Homo sapiens
aataaattattagttcccataactagacagttggaattacagcaaaacagtcatccacagaagctctattgtcca

SEQ ID NO: 195954 - DNA, 76 bp, Homo sapiens
ttattagttcccataactagacagttggaattacagcaaaacagtcatccacagaagctctattgtccagcgttta

SEQ ID NO: 195955 - DNA, 76 bp, Homo sapiens
tagttcccataactagacagttggaattacagcaaaacagtcatccacagaagctctattgtccagcgtttagaaa

SEQ ID NO: 195956 - DNA, 78 bp, Homo sapiens
ataactagacagttggaattacagcaaaacagtcatccacagaagctctattgtccagcgtttagaaatgtgaataca

SEQ ID NO: 195957 - DNA, 78 bp, Homo sapiens
taactagacagttggaattacagcaaaacagtcatccacagaagctctattgtccagcgtttagaaatgtgaatacaa

SEQ ID NO: 195958 - DNA, 77 bp, Homo sapiens
acagttggaattacagcaaaacagtcatccacagaagctctattgtccagcgtttagaaatgtgaatacaaagcaaa

SEQ ID NO: 195959 - DNA, 75 bp, Homo sapiens
aattacagcaaaacagtcatccacagaagctctattgtccagcgtttagaaatgtgaatacaaagcaaaccctaa

SEQ ID NO: 195960 - DNA, 76 bp, Homo sapiens
atccacagaagctctattgtccagcgtttagaaatgtgaatacaaagcaaaccctaacttggcaattacatatata

SEQ ID NO: 195961 - DNA, 75 bp, Homo sapiens
gaagctctattgtccagcgtttagaaatgtgaatacaaagcaaaccctaacttggcaattacatatatatattta

SEQ ID NO: 195962 - DNA, 72 bp, Homo sapiens
atttatttataagcatttagctaaaatttatttagtgaataattgaaacatacataatttgccaatataatg

SEQ ID NO: 195963 - DNA, 75 bp, Homo sapiens
tataagcatttagctaaaatttatttagtgaataattgaaacatacataatttgccaatataatgtaagcttgga

SEQ ID NO: 195964 - DNA, 74 bp, Homo sapiens
gctaaaatttatttagtgaataattgaaacatacataatttgccaatataatgtaagcttggatttccatattc

SEQ ID NO: 195965 - DNA, 69 bp, Homo sapiens
aaacatacataatttgccaatataatgtaagcttggatttccatattctaaaacttttgtttttctaaa

SEQ ID NO: 195966 - DNA, 69 bp, Homo sapiens
tgccaatataatgtaagcttggatttccatattctaaaacttttgtttttctaaatatttcaaagaaac

SEQ ID NO: 195967 - DNA, 69 bp, Homo sapiens
tgtaagcttggatttccatattctaaaacttttgtttttctaaatatttcaaagaaacttatgtctata

SEQ ID NO: 195968 - DNA, 67 bp, Homo sapiens
gcttggatttccatattctaaaacttttgtttttctaaatatttcaaagaaacttatgtctataatt

SEQ ID NO: 195969 - DNA, 67 bp, Homo sapiens
gatttccatattctaaaacttttgtttttctaaatatttcaaagaaacttatgtctataatttaata

SEQ ID NO: 195970 - DNA, 68 bp, Homo sapiens
ccatattctaaaacttttgtttttctaaatatttcaaagaaacttatgtctataatttaatatattca

SEQ ID NO: 195971 - DNA, 66 bp, Homo sapiens
aaacttttgtttttctaaatatttcaaagaaacttatgtctataatttaatatattcaagtatagt

SEQ ID NO: 195972 - DNA, 67 bp, Homo sapiens
cttttgtttttctaaatatttcaaagaaacttatgtctataatttaatatattcaagtatagttccc

SEQ ID NO: 195973 - DNA, 72 bp, Homo sapiens
tatttcaaagaaacttatgtctataatttaatatattcaagtatagttcccttttctcttatgtattagcaa

SEQ ID NO: 195974 - DNA, 71 bp, Homo sapiens
tataatttaatatattcaagtatagttcccttttctcttatgtattagcaaccaaactgaattttaggtga

SEQ ID NO: 195975 - DNA, 74 bp, Homo sapiens
tatattcaagtatagttcccttttctcttatgtattagcaaccaaactgaattttaggtgatcaagcataacat

SEQ ID NO: 195976 - DNA, 72 bp, Homo sapiens
caagtatagttcccttttctcttatgtattagcaaccaaactgaattttaggtgatcaagcataacatttta

SEQ ID NO: 195977 - DNA, 77 bp, Homo sapiens
tgtattagcaaccaaactgaattttaggtgatcaagcataacattttattgaaagtatatgatggaattcactacac

SEQ ID NO: 195978 - DNA, 74 bp, Homo sapiens
attttaggtgatcaagcataacattttattgaaagtatatgatggaattcactacactgtaagactaaaaccag

SEQ ID NO: 195979 - DNA, 78 bp, Homo sapiens
atcaagcataacattttattgaaagtatatgatggaattcactacactgtaagactaaaaccaggaacagtgcatcca

SEQ ID NO: 195980 - DNA, 77 bp, Homo sapiens
acattttattgaaagtatatgatggaattcactacactgtaagactaaaaccaggaacagtgcatccatgagtataa

SEQ ID NO: 195981 - DNA, 80 bp, Homo sapiens
tattgaaagtatatgatggaattcactacactgtaagactaaaaccaggaacagtgcatccatgagtataatgtatgttg

SEQ ID NO: 195982 - DNA, 82 bp, Homo sapiens
tatgatggaattcactacactgtaagactaaaaccaggaacagtgcatccatgagtataatgtatgttgtgaataatcacta

SEQ ID NO: 195983 - DNA, 81 bp, Homo sapiens
aattcactacactgtaagactaaaaccaggaacagtgcatccatgagtataatgtatgttgtgaataatcactatcaatgc

SEQ ID NO: 195984 - DNA, 81 bp, Homo sapiens
actgtaagactaaaaccaggaacagtgcatccatgagtataatgtatgttgtgaataatcactatcaatgccactatattc

SEQ ID NO: 195985 - DNA, 80 bp, Homo sapiens
aaaaccaggaacagtgcatccatgagtataatgtatgttgtgaataatcactatcaatgccactatattcccacataaaa

SEQ ID NO: 195986 - DNA, 82 bp, Homo sapiens
aacagtgcatccatgagtataatgtatgttgtgaataatcactatcaatgccactatattcccacataaaaaggcaaatagc

SEQ ID NO: 195987 - DNA, 81 bp, Homo sapiens
catgagtataatgtatgttgtgaataatcactatcaatgccactatattcccacataaaaaggcaaatagcccactattga

SEQ ID NO: 195988 - DNA, 80 bp, Homo sapiens
tgtatgttgtgaataatcactatcaatgccactatattcccacataaaaaggcaaatagcccactattgatttattctgc

SEQ ID NO: 195989 - DNA, 77 bp, Homo sapiens
gtgaataatcactatcaatgccactatattcccacataaaaaggcaaatagcccactattgatttattctgctaatt

SEQ ID NO: 195990 - DNA, 78 bp, Homo sapiens
caatgccactatattcccacataaaaaggcaaatagcccactattgatttattctgctaatttcaacaatcattgatc

SEQ ID NO: 195991 - DNA, 76 bp, Homo sapiens
ctatattcccacataaaaaggcaaatagcccactattgatttattctgctaatttcaacaatcattgatcttgagg

SEQ ID NO: 195992 - DNA, 78 bp, Homo sapiens
cacataaaaaggcaaatagcccactattgatttattctgctaatttcaacaatcattgatcttgaggtacatgccaaa

SEQ ID NO: 195993 - DNA, 80 bp, Homo sapiens
gcaaatagcccactattgatttattctgctaatttcaacaatcattgatcttgaggtacatgccaaaaatgcctgaataa

SEQ ID NO: 195994 - DNA, 79 bp, Homo sapiens
ccactattgatttattctgctaatttcaacaatcattgatcttgaggtacatgccaaaaatgcctgaataagctttgaa

SEQ ID NO: 195995 - DNA, 78 bp, Homo sapiens
gatttattctgctaatttcaacaatcattgatcttgaggtacatgccaaaaatgcctgaataagctttgaaatgtaaa

SEQ ID NO: 195996 - DNA, 75 bp, Homo sapiens
gctaatttcaacaatcattgatcttgaggtacatgccaaaaatgcctgaataagctttgaaatgtaaaacaaaaa

SEQ ID NO: 195997 - DNA, 73 bp, Homo sapiens
acaatcattgatcttgaggtacatgccaaaaatgcctgaataagctttgaaatgtaaaacaaaaatgttttaa

SEQ ID NO: 195998 - DNA, 69 bp, Homo sapiens
atcttgaggtacatgccaaaaatgcctgaataagctttgaaatgtaaaacaaaaatgttttaaagaagt

SEQ ID NO: 195999 - DNA, 67 bp, Homo sapiens
aaaaatgttttaaagaagtttaattgcagttggccaatatatacttaatatggcttgcatttttttt

SEQ ID NO: 196000 - DNA, 67 bp, Homo sapiens
ttttttttgaaataacattgtgacttaaaggatttctaggtcctaaaatctggaaaagggatctgga

SEQ ID NO: 196001 - DNA, 67 bp, Homo sapiens
gaaataacattgtgacttaaaggatttctaggtcctaaaatctggaaaagggatctggaaaaatttg

SEQ ID NO: 196002 - DNA, 69 bp, Homo sapiens
attgtgacttaaaggatttctaggtcctaaaatctggaaaagggatctggaaaaatttggactccatga

SEQ ID NO: 196003 - DNA, 68 bp, Homo sapiens
taaaggatttctaggtcctaaaatctggaaaagggatctggaaaaatttggactccatgagtagtttg

SEQ ID NO: 196004 - DNA, 72 bp, Homo sapiens
taggtcctaaaatctggaaaagggatctggaaaaatttggactccatgagtagtttggattcaatctctctg

SEQ ID NO: 196005 - DNA, 71 bp, Homo sapiens
aaatctggaaaagggatctggaaaaatttggactccatgagtagtttggattcaatctctctgtgcttttt

SEQ ID NO: 196006 - DNA, 67 bp, Homo sapiens
ttttttctttataacaggaatgggatggggggtggggggaataaaacttcttatgctatataggtca

SEQ ID NO: 196007 - DNA, 72 bp, Homo sapiens
ttataacaggaatgggatggggggtggggggaataaaacttcttatgctatataggtcatgtactgtgagaa

SEQ ID NO: 196008 - DNA, 71 bp, Homo sapiens
aatgggatggggggtggggggaataaaacttcttatgctatataggtcatgtactgtgagaaacaagaata

SEQ ID NO: 196009 - DNA, 71 bp, Homo sapiens
ggtggggggaataaaacttcttatgctatataggtcatgtactgtgagaaacaagaatacaaaactatggg

SEQ ID NO: 196010 - DNA, 71 bp, Homo sapiens
gggaataaaacttcttatgctatataggtcatgtactgtgagaaacaagaatacaaaactatgggtttaaa

SEQ ID NO: 196011 - DNA, 74 bp, Homo sapiens
cttatgctatataggtcatgtactgtgagaaacaagaatacaaaactatgggtttaaaaacaacatatacagaa

SEQ ID NO: 196012 - DNA, 73 bp, Homo sapiens
taggtcatgtactgtgagaaacaagaatacaaaactatgggtttaaaaacaacatatacagaaataatcgcca

SEQ ID NO: 196013 - DNA, 72 bp, Homo sapiens
actgtgagaaacaagaatacaaaactatgggtttaaaaacaacatatacagaaataatcgccaatctctgtc

SEQ ID NO: 196014 - DNA, 72 bp, Homo sapiens
acaagaatacaaaactatgggtttaaaaacaacatatacagaaataatcgccaatctctgtctacctccaca

SEQ ID NO: 196015 - DNA, 74 bp, Homo sapiens
caaaactatgggtttaaaaacaacatatacagaaataatcgccaatctctgtctacctccacatcattttgtca

SEQ ID NO: 196016 - DNA, 76 bp, Homo sapiens
tgggtttaaaaacaacatatacagaaataatcgccaatctctgtctacctccacatcattttgtcatagaagttca

SEQ ID NO: 196017 - DNA, 78 bp, Homo sapiens
caacatatacagaaataatcgccaatctctgtctacctccacatcattttgtcatagaagttcattgtgattaaaaag

SEQ ID NO: 196018 - DNA, 76 bp, Homo sapiens
atacagaaataatcgccaatctctgtctacctccacatcattttgtcatagaagttcattgtgattaaaaagttta

SEQ ID NO: 196019 - DNA, 72 bp, Homo sapiens
aatcgccaatctctgtctacctccacatcattttgtcatagaagttcattgtgattaaaaagtttaaaagtt

SEQ ID NO: 196020 - DNA, 71 bp, Homo sapiens
ctctgtctacctccacatcattttgtcatagaagttcattgtgattaaaaagtttaaaagtttttaagaga

SEQ ID NO: 196021 - DNA, 68 bp, Homo sapiens
ctccacatcattttgtcatagaagttcattgtgattaaaaagtttaaaagtttttaagagaaaaggta

SEQ ID NO: 196022 - DNA, 65 bp, Homo sapiens
gaagttcattgtgattaaaaagtttaaaagtttttaagagaaaaggtagattgagaagtagaaag

SEQ ID NO: 196023 - DNA, 67 bp, Homo sapiens
ttaagagaaaaggtagattgagaagtagaaaggaagtaggaaggaaattgtgcaaaaaaagaaacag

SEQ ID NO: 196024 - DNA, 68 bp, Homo sapiens
gaagtagaaaggaagtaggaaggaaattgtgcaaaaaaagaaacagtttattagatactctgaccctg

SEQ ID NO: 196025 - DNA, 68 bp, Homo sapiens
aaaggaagtaggaaggaaattgtgcaaaaaaagaaacagtttattagatactctgaccctgggacaca

SEQ ID NO: 196026 - DNA, 68 bp, Homo sapiens
aaggaaattgtgcaaaaaaagaaacagtttattagatactctgaccctgggacacactgttcctttcc

SEQ ID NO: 196027 - DNA, 66 bp, Homo sapiens
caaaaaaagaaacagtttattagatactctgaccctgggacacactgttcctttcccccaaaatat

SEQ ID NO: 196028 - DNA, 68 bp, Homo sapiens
aaacagtttattagatactctgaccctgggacacactgttcctttcccccaaaatattttccgtgata

SEQ ID NO: 196029 - DNA, 70 bp, Homo sapiens
tattagatactctgaccctgggacacactgttcctttcccccaaaatattttccgtgataggaactgaat

SEQ ID NO: 196030 - DNA, 67 bp, Homo sapiens
tgaccctgggacacactgttcctttcccccaaaatattttccgtgataggaactgaatttaaaatta

SEQ ID NO: 196031 - DNA, 68 bp, Homo sapiens
cctttcccccaaaatattttccgtgataggaactgaatttaaaattatcaccttgttagattgcctga

SEQ ID NO: 196032 - DNA, 72 bp, Homo sapiens
ccgtgataggaactgaatttaaaattatcaccttgttagattgcctgaagatccagcaactaaaaacttgat

SEQ ID NO: 196033 - DNA, 73 bp, Homo sapiens
actgaatttaaaattatcaccttgttagattgcctgaagatccagcaactaaaaacttgattaatgcacaact

SEQ ID NO: 196034 - DNA, 72 bp, Homo sapiens
aaaattatcaccttgttagattgcctgaagatccagcaactaaaaacttgattaatgcacaacttccttaaa

SEQ ID NO: 196035 - DNA, 74 bp, Homo sapiens
atcaccttgttagattgcctgaagatccagcaactaaaaacttgattaatgcacaacttccttaaaaaatgcca

SEQ ID NO: 196036 - DNA, 74 bp, Homo sapiens
tgcctgaagatccagcaactaaaaacttgattaatgcacaacttccttaaaaaatgccaattaactattagcca

SEQ ID NO: 196037 - DNA, 74 bp, Homo sapiens
gatccagcaactaaaaacttgattaatgcacaacttccttaaaaaatgccaattaactattagccactgacaga

SEQ ID NO: 196038 - DNA, 70 bp, Homo sapiens
caactaaaaacttgattaatgcacaacttccttaaaaaatgccaattaactattagccactgacagaaaa

SEQ ID NO: 196039 - DNA, 71 bp, Homo sapiens
cttgattaatgcacaacttccttaaaaaatgccaattaactattagccactgacagaaaaatgtaaattaa

SEQ ID NO: 196040 - DNA, 69 bp, Homo sapiens
gcacaacttccttaaaaaatgccaattaactattagccactgacagaaaaatgtaaattaatttaataa

SEQ ID NO: 196041 - DNA, 70 bp, Homo sapiens
aaaatgccaattaactattagccactgacagaaaaatgtaaattaatttaataagatagctttcctttca

SEQ ID NO: 196042 - DNA, 69 bp, Homo sapiens
gccaattaactattagccactgacagaaaaatgtaaattaatttaataagatagctttcctttcacctt

SEQ ID NO: 196043 - DNA, 70 bp, Homo sapiens
gccactgacagaaaaatgtaaattaatttaataagatagctttcctttcacctttttagctggaaatgtc

SEQ ID NO: 196044 - DNA, 70 bp, Homo sapiens
cagaaaaatgtaaattaatttaataagatagctttcctttcacctttttagctggaaatgtctgttctga

SEQ ID NO: 196045 - DNA, 72 bp, Homo sapiens
aattaatttaataagatagctttcctttcacctttttagctggaaatgtctgttctgatagaatggatatcc

SEQ ID NO: 196046 - DNA, 74 bp, Homo sapiens
ttaataagatagctttcctttcacctttttagctggaaatgtctgttctgatagaatggatatcctgatttggg

SEQ ID NO: 196047 - DNA, 74 bp, Homo sapiens
atagctttcctttcacctttttagctggaaatgtctgttctgatagaatggatatcctgatttggggaagagga

SEQ ID NO: 196048 - DNA, 72 bp, Homo sapiens
aaggaacaaggagtaaggatcacacagaatccttctggggatagggtaaatttcgttgatggagtattgctg

SEQ ID NO: 196049 - DNA, 76 bp, Homo sapiens
agtaaggatcacacagaatccttctggggatagggtaaatttcgttgatggagtattgctgtgaggtgctcaaata

SEQ ID NO: 196050 - DNA, 77 bp, Homo sapiens
aatccttctggggatagggtaaatttcgttgatggagtattgctgtgaggtgctcaaataagatagatagcatgaag

SEQ ID NO: 196051 - DNA, 77 bp, Homo sapiens
gggatagggtaaatttcgttgatggagtattgctgtgaggtgctcaaataagatagatagcatgaaggggctggaaa

SEQ ID NO: 196052 - DNA, 79 bp, Homo sapiens
taaatttcgttgatggagtattgctgtgaggtgctcaaataagatagatagcatgaaggggctggaaagccaggagaaa

SEQ ID NO: 196053 - DNA, 82 bp, Homo sapiens
tggagtattgctgtgaggtgctcaaataagatagatagcatgaaggggctggaaagccaggagaaagagaatgtacagaata

SEQ ID NO: 196054 - DNA, 79 bp, Homo sapiens
gtgctcaaataagatagatagcatgaaggggctggaaagccaggagaaagagaatgtacagaataccacaaatatgctt

SEQ ID NO: 196055 - DNA, 77 bp, Homo sapiens
atagatagcatgaaggggctggaaagccaggagaaagagaatgtacagaataccacaaatatgctttgcccacttta

SEQ ID NO: 196056 - DNA, 72 bp, Homo sapiens
aaggggctggaaagccaggagaaagagaatgtacagaataccacaaatatgctttgcccactttaaagccta

SEQ ID NO: 196057 - DNA, 72 bp, Homo sapiens
gctggaaagccaggagaaagagaatgtacagaataccacaaatatgctttgcccactttaaagcctaagttt

SEQ ID NO: 196058 - DNA, 70 bp, Homo sapiens
aaagccaggagaaagagaatgtacagaataccacaaatatgctttgcccactttaaagcctaagttttct

SEQ ID NO: 196059 - DNA, 70 bp, Homo sapiens
aaagagaatgtacagaataccacaaatatgctttgcccactttaaagcctaagttttcttgtgggcctta

SEQ ID NO: 196060 - DNA, 70 bp, Homo sapiens
atgtacagaataccacaaatatgctttgcccactttaaagcctaagttttcttgtgggccttagggccaa

SEQ ID NO: 196061 - DNA, 68 bp, Homo sapiens
aataccacaaatatgctttgcccactttaaagcctaagttttcttgtgggccttagggccaagataaa

SEQ ID NO: 196062 - DNA, 67 bp, Homo sapiens
aaatatgctttgcccactttaaagcctaagttttcttgtgggccttagggccaagataaatggttgt

SEQ ID NO: 196063 - DNA, 65 bp, Homo sapiens
tttgcccactttaaagcctaagttttcttgtgggccttagggccaagataaatggttgttttcct

SEQ ID NO: 196064 - DNA, 69 bp, Homo sapiens
tttaaagcctaagttttcttgtgggccttagggccaagataaatggttgttttccttcttcatatatga

SEQ ID NO: 196065 - DNA, 70 bp, Homo sapiens
taagttttcttgtgggccttagggccaagataaatggttgttttccttcttcatatatgaaagacctcta

SEQ ID NO: 196066 - DNA, 76 bp, Homo sapiens
cttcttcatatatgaaagacctctatctagaaaatactagtcaatctgtatggaagtttctctgggcagtactatt

SEQ ID NO: 196067 - DNA, 74 bp, Homo sapiens
aaaatactagtcaatctgtatggaagtttctctgggcagtactattttaacatgttgttccaatgggcagacat

SEQ ID NO: 196068 - DNA, 76 bp, Homo sapiens
ctagtcaatctgtatggaagtttctctgggcagtactattttaacatgttgttccaatgggcagacattataaata

SEQ ID NO: 196069 - DNA, 76 bp, Homo sapiens
tatggaagtttctctgggcagtactattttaacatgttgttccaatgggcagacattataaataccaagcatctgt

SEQ ID NO: 196070 - DNA, 75 bp, Homo sapiens
tttctctgggcagtactattttaacatgttgttccaatgggcagacattataaataccaagcatctgttcttaag

SEQ ID NO: 196071 - DNA, 72 bp, Homo sapiens
gtactattttaacatgttgttccaatgggcagacattataaataccaagcatctgttcttaaggttgtgggt

SEQ ID NO: 196072 - DNA, 73 bp, Homo sapiens
tttaacatgttgttccaatgggcagacattataaataccaagcatctgttcttaaggttgtgggttgcctaaa

SEQ ID NO: 196073 - DNA, 73 bp, Homo sapiens
caatgggcagacattataaataccaagcatctgttcttaaggttgtgggttgcctaaacatatggaatccctt

SEQ ID NO: 196074 - DNA, 72 bp, Homo sapiens
ataaataccaagcatctgttcttaaggttgtgggttgcctaaacatatggaatccctttgagccaaacagag

SEQ ID NO: 196075 - DNA, 72 bp, Homo sapiens
atctgttcttaaggttgtgggttgcctaaacatatggaatccctttgagccaaacagaggtgctatcaaaat

SEQ ID NO: 196076 - DNA, 70 bp, Homo sapiens
cttaaggttgtgggttgcctaaacatatggaatccctttgagccaaacagaggtgctatcaaaattgttt

SEQ ID NO: 196077 - DNA, 72 bp, Homo sapiens
gggttgcctaaacatatggaatccctttgagccaaacagaggtgctatcaaaattgttttattatattgaat

SEQ ID NO: 196078 - DNA, 73 bp, Homo sapiens
atccctttgagccaaacagaggtgctatcaaaattgttttattatattgaattaccaatgacaataaattaca

SEQ ID NO: 196079 - DNA, 73 bp, Homo sapiens
tgttttattatattgaattaccaatgacaataaattacaaaaaacactgttttagacattgctgagtctaaca

SEQ ID NO: 196080 - DNA, 72 bp, Homo sapiens
taaattacaaaaaacactgttttagacattgctgagtctaacaaaataggctgaagtttgatctttgtgaaa

SEQ ID NO: 196081 - DNA, 72 bp, Homo sapiens
aaaacactgttttagacattgctgagtctaacaaaataggctgaagtttgatctttgtgaaaggacttgaaa

SEQ ID NO: 196082 - DNA, 72 bp, Homo sapiens
gttttagacattgctgagtctaacaaaataggctgaagtttgatctttgtgaaaggacttgaaaccattgtt

SEQ ID NO: 196083 - DNA, 71 bp, Homo sapiens
acattgctgagtctaacaaaataggctgaagtttgatctttgtgaaaggacttgaaaccattgttttttcc

SEQ ID NO: 196084 - DNA, 68 bp, Homo sapiens
gtctaacaaaataggctgaagtttgatctttgtgaaaggacttgaaaccattgttttttcccacaaaa

SEQ ID NO: 196085 - DNA, 69 bp, Homo sapiens
ataggctgaagtttgatctttgtgaaaggacttgaaaccattgttttttcccacaaaaatccccatcac

SEQ ID NO: 196086 - DNA, 71 bp, Homo sapiens
atctttgtgaaaggacttgaaaccattgttttttcccacaaaaatccccatcaccagcactgcattcgaat

SEQ ID NO: 196087 - DNA, 70 bp, Homo sapiens
aaggacttgaaaccattgttttttcccacaaaaatccccatcaccagcactgcattcgaattttcttgaa

SEQ ID NO: 196088 - DNA, 70 bp, Homo sapiens
ttgaaaccattgttttttcccacaaaaatccccatcaccagcactgcattcgaattttcttgaaaattgt

SEQ ID NO: 196089 - DNA, 70 bp, Homo sapiens
tttttcccacaaaaatccccatcaccagcactgcattcgaattttcttgaaaattgtttcctgagtttat

SEQ ID NO: 196090 - DNA, 73 bp, Homo sapiens
aaaaatccccatcaccagcactgcattcgaattttcttgaaaattgtttcctgagtttattcatggtagtatg

SEQ ID NO: 196091 - DNA, 76 bp, Homo sapiens
atcaccagcactgcattcgaattttcttgaaaattgtttcctgagtttattcatggtagtatgtgcttaaggacaa

SEQ ID NO: 196092 - DNA, 72 bp, Homo sapiens
actgcattcgaattttcttgaaaattgtttcctgagtttattcatggtagtatgtgcttaaggacaacaggt

SEQ ID NO: 196093 - DNA, 71 bp, Homo sapiens
ttttcttgaaaattgtttcctgagtttattcatggtagtatgtgcttaaggacaacaggttgttagtctat

SEQ ID NO: 196094 - DNA, 72 bp, Homo sapiens
aaattgtttcctgagtttattcatggtagtatgtgcttaaggacaacaggttgttagtctatttgagcaaac

SEQ ID NO: 196095 - DNA, 74 bp, Homo sapiens
ttcctgagtttattcatggtagtatgtgcttaaggacaacaggttgttagtctatttgagcaaacctgatgttt

SEQ ID NO: 196096 - DNA, 75 bp, Homo sapiens
ttattcatggtagtatgtgcttaaggacaacaggttgttagtctatttgagcaaacctgatgttttctctaagaa

SEQ ID NO: 196097 - DNA, 70 bp, Homo sapiens
ggttgttagtctatttgagcaaacctgatgttttctctaagaaaaacaaattcaatatcctcccccttca

SEQ ID NO: 196098 - DNA, 69 bp, Homo sapiens
ttctctaagaaaaacaaattcaatatcctcccccttcaagaacaataaaaccccaaactgtgctatcat

SEQ ID NO: 196099 - DNA, 68 bp, Homo sapiens
aaacaaattcaatatcctcccccttcaagaacaataaaaccccaaactgtgctatcattaaatactac

SEQ ID NO: 196100 - DNA, 69 bp, Homo sapiens
tcaatatcctcccccttcaagaacaataaaaccccaaactgtgctatcattaaatactaccaaaaacca

SEQ ID NO: 196101 - DNA, 67 bp, Homo sapiens
cccttcaagaacaataaaaccccaaactgtgctatcattaaatactaccaaaaaccattaactagaa

SEQ ID NO: 196102 - DNA, 72 bp, Homo sapiens
cccaaactgtgctatcattaaatactaccaaaaaccattaactagaaaaacacaatgcaaaatcattattca

SEQ ID NO: 196103 - DNA, 73 bp, Homo sapiens
tgtgctatcattaaatactaccaaaaaccattaactagaaaaacacaatgcaaaatcattattcaagaaccca

SEQ ID NO: 196104 - DNA, 68 bp, Homo sapiens
aatactaccaaaaaccattaactagaaaaacacaatgcaaaatcattattcaagaacccattagaaac

SEQ ID NO: 196105 - DNA, 69 bp, Homo sapiens
ccaaaaaccattaactagaaaaacacaatgcaaaatcattattcaagaacccattagaaaccacagtat

SEQ ID NO: 196106 - DNA, 72 bp, Homo sapiens
actagaaaaacacaatgcaaaatcattattcaagaacccattagaaaccacagtattctaaagtcttataga

SEQ ID NO: 196107 - DNA, 73 bp, Homo sapiens
acacaatgcaaaatcattattcaagaacccattagaaaccacagtattctaaagtcttatagaaaagatgtgt

SEQ ID NO: 196108 - DNA, 71 bp, Homo sapiens
gcaaaatcattattcaagaacccattagaaaccacagtattctaaagtcttatagaaaagatgtgttttta

SEQ ID NO: 196109 - DNA, 71 bp, Homo sapiens
ttagaaaccacagtattctaaagtcttatagaaaagatgtgtttttactagttaagcattgatagaagtcc

SEQ ID NO: 196110 - DNA, 72 bp, Homo sapiens
tctaaagtcttatagaaaagatgtgtttttactagttaagcattgatagaagtcccatcaaaaaaatgttca

SEQ ID NO: 196111 - DNA, 74 bp, Homo sapiens
gatgtgtttttactagttaagcattgatagaagtcccatcaaaaaaatgttcaatccaaatctgcatttttggc

SEQ ID NO: 196112 - DNA, 77 bp, Homo sapiens
tagttaagcattgatagaagtcccatcaaaaaaatgttcaatccaaatctgcatttttggctatggagttctagcca

SEQ ID NO: 196113 - DNA, 75 bp, Homo sapiens
attgatagaagtcccatcaaaaaaatgttcaatccaaatctgcatttttggctatggagttctagccaaactgga

SEQ ID NO: 196114 - DNA, 74 bp, Homo sapiens
aaaaatgttcaatccaaatctgcatttttggctatggagttctagccaaactggacaggattaggcatccttac

SEQ ID NO: 196115 - DNA, 75 bp, Homo sapiens
ccaaatctgcatttttggctatggagttctagccaaactggacaggattaggcatccttacctgggctccttcta

SEQ ID NO: 196116 - DNA, 74 bp, Homo sapiens
tatggagttctagccaaactggacaggattaggcatccttacctgggctccttctacaaaatgacagtatgttt

SEQ ID NO: 196117 - DNA, 75 bp, Homo sapiens
ttctagccaaactggacaggattaggcatccttacctgggctccttctacaaaatgacagtatgttttgaagctc

SEQ ID NO: 196118 - DNA, 76 bp, Homo sapiens
tggacaggattaggcatccttacctgggctccttctacaaaatgacagtatgttttgaagctctcccatataataa

SEQ ID NO: 196119 - DNA, 74 bp, Homo sapiens
attaggcatccttacctgggctccttctacaaaatgacagtatgttttgaagctctcccatataataaggttgc

SEQ ID NO: 196120 - DNA, 72 bp, Homo sapiens
ttacctgggctccttctacaaaatgacagtatgttttgaagctctcccatataataaggttgccccctacta

SEQ ID NO: 196121 - DNA, 73 bp, Homo sapiens
ttctacaaaatgacagtatgttttgaagctctcccatataataaggttgccccctactactgtggttaagcta

SEQ ID NO: 196122 - DNA, 73 bp, Homo sapiens
aaatgacagtatgttttgaagctctcccatataataaggttgccccctactactgtggttaagctagcatatt

SEQ ID NO: 196123 - DNA, 71 bp, Homo sapiens
atgttttgaagctctcccatataataaggttgccccctactactgtggttaagctagcatatttgagtttt

SEQ ID NO: 196124 - DNA, 71 bp, Homo sapiens
ctctcccatataataaggttgccccctactactgtggttaagctagcatatttgagtttttcactagaaaa

SEQ ID NO: 196125 - DNA, 71 bp, Homo sapiens
atataataaggttgccccctactactgtggttaagctagcatatttgagtttttcactagaaaactctcaa

SEQ ID NO: 196126 - DNA, 73 bp, Homo sapiens
ctactgtggttaagctagcatatttgagtttttcactagaaaactctcaaacaattatcgggtacatccagta

SEQ ID NO: 196127 - DNA, 75 bp, Homo sapiens
ttaagctagcatatttgagtttttcactagaaaactctcaaacaattatcgggtacatccagtagcatacctgta

SEQ ID NO: 196128 - DNA, 74 bp, Homo sapiens
tgagtttttcactagaaaactctcaaacaattatcgggtacatccagtagcatacctgtatcttttatacactg

SEQ ID NO: 196129 - DNA, 75 bp, Homo sapiens
ttttcactagaaaactctcaaacaattatcgggtacatccagtagcatacctgtatcttttatacactgtcagtc

SEQ ID NO: 196130 - DNA, 74 bp, Homo sapiens
aaaactctcaaacaattatcgggtacatccagtagcatacctgtatcttttatacactgtcagtcctcactggg

SEQ ID NO: 196131 - DNA, 79 bp, Homo sapiens
tatcttttatacactgtcagtcctcactgggtgatcagaaatcatgctgttcattgcttaattcttatagtgttccttt

SEQ ID NO: 196132 - DNA, 82 bp, Homo sapiens
tatacactgtcagtcctcactgggtgatcagaaatcatgctgttcattgcttaattcttatagtgttccttttatgatagga

SEQ ID NO: 196133 - DNA, 81 bp, Homo sapiens
agtcctcactgggtgatcagaaatcatgctgttcattgcttaattcttatagtgttccttttatgataggactgtatggca

SEQ ID NO: 196134 - DNA, 84 bp, Homo sapiens
tgatcagaaatcatgctgttcattgcttaattcttatagtgttccttttatgataggactgtatggcatgacctttctgagcaa

SEQ ID NO: 196135 - DNA, 81 bp, Homo sapiens
tcatgctgttcattgcttaattcttatagtgttccttttatgataggactgtatggcatgacctttctgagcaagctaatt

SEQ ID NO: 196136 - DNA, 77 bp, Homo sapiens
gttcattgcttaattcttatagtgttccttttatgataggactgtatggcatgacctttctgagcaagctaatttaa

SEQ ID NO: 196137 - DNA, 75 bp, Homo sapiens
tgttccttttatgataggactgtatggcatgacctttctgagcaagctaatttaaaattaattaagactgtctac

SEQ ID NO: 196138 - DNA, 73 bp, Homo sapiens
gataggactgtatggcatgacctttctgagcaagctaatttaaaattaattaagactgtctactttttaaagc

SEQ ID NO: 196139 - DNA, 74 bp, Homo sapiens
gactgtatggcatgacctttctgagcaagctaatttaaaattaattaagactgtctactttttaaagccattga

SEQ ID NO: 196140 - DNA, 72 bp, Homo sapiens
catgacctttctgagcaagctaatttaaaattaattaagactgtctactttttaaagccattgattatagaa

SEQ ID NO: 196141 - DNA, 69 bp, Homo sapiens
ttaagactgtctactttttaaagccattgattatagaaaacctgaaagttattttgtaatcatttttca

SEQ ID NO: 196142 - DNA, 70 bp, Homo sapiens
taaagccattgattatagaaaacctgaaagttattttgtaatcatttttcattttctgatttcacttccc

SEQ ID NO: 196143 - DNA, 65 bp, Homo sapiens
aaacctgaaagttattttgtaatcatttttcattttctgatttcacttcccctaattttattact

SEQ ID NO: 196144 - DNA, 70 bp, Homo sapiens
ttttgtaatcatttttcattttctgatttcacttcccctaattttattacttaaaatgcatccatggaaa

SEQ ID NO: 196145 - DNA, 72 bp, Homo sapiens
catttttcattttctgatttcacttcccctaattttattacttaaaatgcatccatggaaatagtatctctg

SEQ ID NO: 196146 - DNA, 72 bp, Homo sapiens
ttctgatttcacttcccctaattttattacttaaaatgcatccatggaaatagtatctctgtcctgaaaact

SEQ ID NO: 196147 - DNA, 72 bp, Homo sapiens
cacttcccctaattttattacttaaaatgcatccatggaaatagtatctctgtcctgaaaacttcaacacca

SEQ ID NO: 196148 - DNA, 73 bp, Homo sapiens
attttattacttaaaatgcatccatggaaatagtatctctgtcctgaaaacttcaacaccaaaatcacacctc

SEQ ID NO: 196149 - DNA, 74 bp, Homo sapiens
attacttaaaatgcatccatggaaatagtatctctgtcctgaaaacttcaacaccaaaatcacacctctgagtt

SEQ ID NO: 196150 - DNA, 78 bp, Homo sapiens
tccatggaaatagtatctctgtcctgaaaacttcaacaccaaaatcacacctctgagtttgacttatcgattctgata

SEQ ID NO: 196151 - DNA, 75 bp, Homo sapiens
aaatagtatctctgtcctgaaaacttcaacaccaaaatcacacctctgagtttgacttatcgattctgataggaa

SEQ ID NO: 196152 - DNA, 78 bp, Homo sapiens
tgtcctgaaaacttcaacaccaaaatcacacctctgagtttgacttatcgattctgataggaaggcataacagcacta

SEQ ID NO: 196153 - DNA, 76 bp, Homo sapiens
aaaacttcaacaccaaaatcacacctctgagtttgacttatcgattctgataggaaggcataacagcactagataa

SEQ ID NO: 196154 - DNA, 78 bp, Homo sapiens
aaaatcacacctctgagtttgacttatcgattctgataggaaggcataacagcactagataatgacagaaggaaaata

SEQ ID NO: 196155 - DNA, 80 bp, Homo sapiens
gtttgacttatcgattctgataggaaggcataacagcactagataatgacagaaggaaaataagtcagaatatatgctta

SEQ ID NO: 196156 - DNA, 80 bp, Homo sapiens
tcgattctgataggaaggcataacagcactagataatgacagaaggaaaataagtcagaatatatgcttacaaactgtta

SEQ ID NO: 196157 - DNA, 80 bp, Homo sapiens
taggaaggcataacagcactagataatgacagaaggaaaataagtcagaatatatgcttacaaactgttacatgcaagta

SEQ ID NO: 196158 - DNA, 79 bp, Homo sapiens
aacagcactagataatgacagaaggaaaataagtcagaatatatgcttacaaactgttacatgcaagtacatatagtaa

SEQ ID NO: 196159 - DNA, 78 bp, Homo sapiens
agataatgacagaaggaaaataagtcagaatatatgcttacaaactgttacatgcaagtacatatagtaataaagcaa

SEQ ID NO: 196160 - DNA, 77 bp, Homo sapiens
cagaaggaaaataagtcagaatatatgcttacaaactgttacatgcaagtacatatagtaataaagcaaatgagaaa

SEQ ID NO: 196161 - DNA, 75 bp, Homo sapiens
atatatgcttacaaactgttacatgcaagtacatatagtaataaagcaaatgagaaaaaaagccaaaatggaaca

SEQ ID NO: 196162 - DNA, 71 bp, Homo sapiens
tagtaataaagcaaatgagaaaaaaagccaaaatggaacataaaaagccataagacatgatacctaactac

SEQ ID NO: 196163 - DNA, 71 bp, Homo sapiens
gcaaatgagaaaaaaagccaaaatggaacataaaaagccataagacatgatacctaactacttctaagtaa

SEQ ID NO: 196164 - DNA, 67 bp, Homo sapiens
aaaaaagccaaaatggaacataaaaagccataagacatgatacctaactacttctaagtaattattt

SEQ ID NO: 196165 - DNA, 73 bp, Homo sapiens
agccaaaatggaacataaaaagccataagacatgatacctaactacttctaagtaattatttttcatgtggca

SEQ ID NO: 196166 - DNA, 73 bp, Homo sapiens
gaacataaaaagccataagacatgatacctaactacttctaagtaattatttttcatgtggcataaattgtta

SEQ ID NO: 196167 - DNA, 73 bp, Homo sapiens
agccataagacatgatacctaactacttctaagtaattatttttcatgtggcataaattgttatttaatctct

SEQ ID NO: 196168 - DNA, 72 bp, Homo sapiens
catgatacctaactacttctaagtaattatttttcatgtggcataaattgttatttaatctctttcaattat

SEQ ID NO: 196169 - DNA, 70 bp, Homo sapiens
gtaattatttttcatgtggcataaattgttatttaatctctttcaattatttccaaaagatacctcaaaa

SEQ ID NO: 196170 - DNA, 73 bp, Homo sapiens
ttcatgtggcataaattgttatttaatctctttcaattatttccaaaagatacctcaaaataagaatacatac

SEQ ID NO: 196171 - DNA, 71 bp, Homo sapiens
ctttcaattatttccaaaagatacctcaaaataagaatacatactttaatatatcacacccaggaaacaga

SEQ ID NO: 196172 - DNA, 74 bp, Homo sapiens
ttccaaaagatacctcaaaataagaatacatactttaatatatcacacccaggaaacagatatttgtgcatggg

SEQ ID NO: 196173 - DNA, 74 bp, Homo sapiens
cctcaaaataagaatacatactttaatatatcacacccaggaaacagatatttgtgcatggggtatagattatt

SEQ ID NO: 196174 - DNA, 76 bp, Homo sapiens
gaatacatactttaatatatcacacccaggaaacagatatttgtgcatggggtatagattatttacattacaaaca

SEQ ID NO: 196175 - DNA, 75 bp, Homo sapiens
actttaatatatcacacccaggaaacagatatttgtgcatggggtatagattatttacattacaaacagaatatg

SEQ ID NO: 196176 - DNA, 74 bp, Homo sapiens
cacacccaggaaacagatatttgtgcatggggtatagattatttacattacaaacagaatatgtatagtttctt

SEQ ID NO: 196177 - DNA, 73 bp, Homo sapiens
ccaggaaacagatatttgtgcatggggtatagattatttacattacaaacagaatatgtatagtttcttttat

SEQ ID NO: 196178 - DNA, 73 bp, Homo sapiens
gatatttgtgcatggggtatagattatttacattacaaacagaatatgtatagtttcttttattaaataccaa

SEQ ID NO: 196179 - DNA, 68 bp, Homo sapiens
gggtatagattatttacattacaaacagaatatgtatagtttcttttattaaataccaaagttacgag

SEQ ID NO: 196180 - DNA, 67 bp, Homo sapiens
atttacattacaaacagaatatgtatagtttcttttattaaataccaaagttacgagtttcctagcc

SEQ ID NO: 196181 - DNA, 67 bp, Homo sapiens
acaaacagaatatgtatagtttcttttattaaataccaaagttacgagtttcctagcctaaattgta

SEQ ID NO: 196182 - DNA, 70 bp, Homo sapiens
atgtatagtttcttttattaaataccaaagttacgagtttcctagcctaaattgtataattcagcactca

SEQ ID NO: 196183 - DNA, 70 bp, Homo sapiens
tcttttattaaataccaaagttacgagtttcctagcctaaattgtataattcagcactcagtaatcaact

SEQ ID NO: 196184 - DNA, 73 bp, Homo sapiens
ttaaataccaaagttacgagtttcctagcctaaattgtataattcagcactcagtaatcaactttctctctga

SEQ ID NO: 196185 - DNA, 74 bp, Homo sapiens
caaagttacgagtttcctagcctaaattgtataattcagcactcagtaatcaactttctctctgaataaagcaa

SEQ ID NO: 196186 - DNA, 74 bp, Homo sapiens
gtttcctagcctaaattgtataattcagcactcagtaatcaactttctctctgaataaagcaaaataaaataca

SEQ ID NO: 196187 - DNA, 76 bp, Homo sapiens
attgtataattcagcactcagtaatcaactttctctctgaataaagcaaaataaaatacatagcaaatagtacacc

SEQ ID NO: 196188 - DNA, 74 bp, Homo sapiens
cagtaatcaactttctctctgaataaagcaaaataaaatacatagcaaatagtacacctaacacgcacaagtag

SEQ ID NO: 196189 - DNA, 73 bp, Homo sapiens
caactttctctctgaataaagcaaaataaaatacatagcaaatagtacacctaacacgcacaagtagttcact

SEQ ID NO: 196190 - DNA, 74 bp, Homo sapiens
ctgaataaagcaaaataaaatacatagcaaatagtacacctaacacgcacaagtagttcacttatattcactaa

SEQ ID NO: 196191 - DNA, 73 bp, Homo sapiens
aataaaatacatagcaaatagtacacctaacacgcacaagtagttcacttatattcactaaagaaaactgtga

SEQ ID NO: 196192 - DNA, 76 bp, Homo sapiens
atacatagcaaatagtacacctaacacgcacaagtagttcacttatattcactaaagaaaactgtgatatcctcca

SEQ ID NO: 196193 - DNA, 75 bp, Homo sapiens
tagtacacctaacacgcacaagtagttcacttatattcactaaagaaaactgtgatatcctccagtttacattca

SEQ ID NO: 196194 - DNA, 75 bp, Homo sapiens
ctaacacgcacaagtagttcacttatattcactaaagaaaactgtgatatcctccagtttacattcatgaattct

SEQ ID NO: 196195 - DNA, 77 bp, Homo sapiens
tagtagtagtagtagcagtagtagctgctgctgttgttgtagcaacggtattttcttcaacaacgtgaaatgattct

SEQ ID NO: 196196 - DNA, 78 bp, Homo sapiens
agtagcagtagtagctgctgctgttgttgtagcaacggtattttcttcaacaacgtgaaatgattctttagcatttca

SEQ ID NO: 196197 - DNA, 77 bp, Homo sapiens
agtagtagctgctgctgttgttgtagcaacggtattttcttcaacaacgtgaaatgattctttagcatttcatcatt

SEQ ID NO: 196198 - DNA, 76 bp, Homo sapiens
gctgctgttgttgtagcaacggtattttcttcaacaacgtgaaatgattctttagcatttcatcatttagagaaaa

SEQ ID NO: 196199 - DNA, 74 bp, Homo sapiens
gttgtagcaacggtattttcttcaacaacgtgaaatgattctttagcatttcatcatttagagaaaagaataca

SEQ ID NO: 196200 - DNA, 75 bp, Homo sapiens
ttttcttcaacaacgtgaaatgattctttagcatttcatcatttagagaaaagaatacatactacacagtggttc

SEQ ID NO: 196201 - DNA, 77 bp, Homo sapiens
ttcaacaacgtgaaatgattctttagcatttcatcatttagagaaaagaatacatactacacagtggttctgaatta

SEQ ID NO: 196202 - DNA, 77 bp, Homo sapiens
tgattctttagcatttcatcatttagagaaaagaatacatactacacagtggttctgaattatacattaaataagac

SEQ ID NO: 196203 - DNA, 76 bp, Homo sapiens
gcatttcatcatttagagaaaagaatacatactacacagtggttctgaattatacattaaataagaccaatttggc

SEQ ID NO: 196204 - DNA, 75 bp, Homo sapiens
tcatcatttagagaaaagaatacatactacacagtggttctgaattatacattaaataagaccaatttggccagt

SEQ ID NO: 196205 - DNA, 71 bp, Homo sapiens
gagaaaagaatacatactacacagtggttctgaattatacattaaataagaccaatttggccagtttttta

SEQ ID NO: 196206 - DNA, 72 bp, Homo sapiens
tacatactacacagtggttctgaattatacattaaataagaccaatttggccagttttttataaatatgatt

SEQ ID NO: 196207 - DNA, 70 bp, Homo sapiens
gtggttctgaattatacattaaataagaccaatttggccagttttttataaatatgattttaaaatgtgc

SEQ ID NO: 196208 - DNA, 70 bp, Homo sapiens
tgaattatacattaaataagaccaatttggccagttttttataaatatgattttaaaatgtgctcaaatt

SEQ ID NO: 196209 - DNA, 68 bp, Homo sapiens
ataagaccaatttggccagttttttataaatatgattttaaaatgtgctcaaattttttgtagaccat

SEQ ID NO: 196210 - DNA, 68 bp, Homo sapiens
accaatttggccagttttttataaatatgattttaaaatgtgctcaaattttttgtagaccattaata

SEQ ID NO: 196211 - DNA, 69 bp, Homo sapiens
tttttataaatatgattttaaaatgtgctcaaattttttgtagaccattaatattattcatatttaaaa

SEQ ID NO: 196212 - DNA, 71 bp, Homo sapiens
tatgattttaaaatgtgctcaaattttttgtagaccattaatattattcatatttaaaatgttagtttatc

SEQ ID NO: 196213 - DNA, 72 bp, Homo sapiens
aaatgtgctcaaattttttgtagaccattaatattattcatatttaaaatgttagtttatcttcatgaagta

SEQ ID NO: 196214 - DNA, 73 bp, Homo sapiens
tgctcaaattttttgtagaccattaatattattcatatttaaaatgttagtttatcttcatgaagtaaaatga

SEQ ID NO: 196215 - DNA, 75 bp, Homo sapiens
tgtagaccattaatattattcatatttaaaatgttagtttatcttcatgaagtaaaatgattaagtagcattgtc

SEQ ID NO: 196216 - DNA, 73 bp, Homo sapiens
cattaatattattcatatttaaaatgttagtttatcttcatgaagtaaaatgattaagtagcattgtctaaag

SEQ ID NO: 196217 - DNA, 72 bp, Homo sapiens
tatttaaaatgttagtttatcttcatgaagtaaaatgattaagtagcattgtctaaagtttactgtaataca

SEQ ID NO: 196218 - DNA, 82 bp, Homo sapiens
cttcatgaagtaaaatgattaagtagcattgtctaaagtttactgtaatacaatatactatatcatgtgtgctatatgcaca

SEQ ID NO: 196219 - DNA, 87 bp, Homo sapiens
ttactgtaatacaatatactatatcatgtgtgctatatgcacaagtccactacagcaagatgtcaactgtattatcataggattcaa

SEQ ID NO: 196220 - DNA, 88 bp, Homo sapiens
caatatactatatcatgtgtgctatatgcacaagtccactacagcaagatgtcaactgtattatcataggattcaaggtagaatgata

SEQ ID NO: 196221 - DNA, 83 bp, Homo sapiens
acaagtccactacagcaagatgtcaactgtattatcataggattcaaggtagaatgatatgctacactgtacttcaaagcaca

SEQ ID NO: 196222 - DNA, 85 bp, Homo sapiens
tacagcaagatgtcaactgtattatcataggattcaaggtagaatgatatgctacactgtacttcaaagcacatcgaagtcagaa

SEQ ID NO: 196223 - DNA, 81 bp, Homo sapiens
aagatgtcaactgtattatcataggattcaaggtagaatgatatgctacactgtacttcaaagcacatcgaagtcagaaaa

SEQ ID NO: 196224 - DNA, 81 bp, Homo sapiens
tgtattatcataggattcaaggtagaatgatatgctacactgtacttcaaagcacatcgaagtcagaaaaacaacagtgta

SEQ ID NO: 196225 - DNA, 78 bp, Homo sapiens
attcaaggtagaatgatatgctacactgtacttcaaagcacatcgaagtcagaaaaacaacagtgtagttcatttata

SEQ ID NO: 196226 - DNA, 76 bp, Homo sapiens
aggtagaatgatatgctacactgtacttcaaagcacatcgaagtcagaaaaacaacagtgtagttcatttataaag

SEQ ID NO: 196227 - DNA, 77 bp, Homo sapiens
atatgctacactgtacttcaaagcacatcgaagtcagaaaaacaacagtgtagttcatttataaaggggatagatga

SEQ ID NO: 196228 - DNA, 76 bp, Homo sapiens
ctgtacttcaaagcacatcgaagtcagaaaaacaacagtgtagttcatttataaaggggatagatgatgattacaa

SEQ ID NO: 196229 - DNA, 76 bp, Homo sapiens
gcacatcgaagtcagaaaaacaacagtgtagttcatttataaaggggatagatgatgattacaatccaattggtta

SEQ ID NO: 196230 - DNA, 73 bp, Homo sapiens
gtcagaaaaacaacagtgtagttcatttataaaggggatagatgatgattacaatccaattggttaacttgaa

SEQ ID NO: 196231 - DNA, 72 bp, Homo sapiens
aacaacagtgtagttcatttataaaggggatagatgatgattacaatccaattggttaacttgaaagtcagt

SEQ ID NO: 196232 - DNA, 73 bp, Homo sapiens
catttataaaggggatagatgatgattacaatccaattggttaacttgaaagtcagtttatataacaccagga

SEQ ID NO: 196233 - DNA, 75 bp, Homo sapiens
aggggatagatgatgattacaatccaattggttaacttgaaagtcagtttatataacaccaggatagtgtcaaca

SEQ ID NO: 196234 - DNA, 76 bp, Homo sapiens
gatgattacaatccaattggttaacttgaaagtcagtttatataacaccaggatagtgtcaacaccacatacttca

SEQ ID NO: 196235 - DNA, 73 bp, Homo sapiens
ttacaatccaattggttaacttgaaagtcagtttatataacaccaggatagtgtcaacaccacatacttcatt

SEQ ID NO: 196236 - DNA, 72 bp, Homo sapiens
attggttaacttgaaagtcagtttatataacaccaggatagtgtcaacaccacatacttcattttcaaaggc

SEQ ID NO: 196237 - DNA, 73 bp, Homo sapiens
agtcagtttatataacaccaggatagtgtcaacaccacatacttcattttcaaaggcttaactatgacctatt

SEQ ID NO: 196238 - DNA, 74 bp, Homo sapiens
caggatagtgtcaacaccacatacttcattttcaaaggcttaactatgacctatttataagattacaccaacag

SEQ ID NO: 196239 - DNA, 73 bp, Homo sapiens
gtcaacaccacatacttcattttcaaaggcttaactatgacctatttataagattacaccaacagtataaagc

SEQ ID NO: 196240 - DNA, 67 bp, Homo sapiens
attttcaaaggcttaactatgacctatttataagattacaccaacagtataaagcctttggaaaaaa

SEQ ID NO: 196241 - DNA, 64 bp, Homo sapiens
aaaaaaagtttcacttgtactaaatttccatgatgtaaaatttacagaagccttataaaaacct

SEQ ID NO: 196242 - DNA, 66 bp, Homo sapiens
aagtttcacttgtactaaatttccatgatgtaaaatttacagaagccttataaaaacctttatttc

SEQ ID NO: 196243 - DNA, 75 bp, Homo sapiens
tttacagaagccttataaaaacctttatttctaaatgaggccacttattatggataatatacagatctgcctgca

SEQ ID NO: 196244 - DNA, 78 bp, Homo sapiens
gccttataaaaacctttatttctaaatgaggccacttattatggataatatacagatctgcctgcacacattatctga

SEQ ID NO: 196245 - DNA, 80 bp, Homo sapiens
acctttatttctaaatgaggccacttattatggataatatacagatctgcctgcacacattatctgagatataattcttc

SEQ ID NO: 196246 - DNA, 80 bp, Homo sapiens
ctaaatgaggccacttattatggataatatacagatctgcctgcacacattatctgagatataattcttctataaaaact

SEQ ID NO: 196247 - DNA, 81 bp, Homo sapiens
gccacttattatggataatatacagatctgcctgcacacattatctgagatataattcttctataaaaactttggcaccaa

SEQ ID NO: 196248 - DNA, 81 bp, Homo sapiens
aatatacagatctgcctgcacacattatctgagatataattcttctataaaaactttggcaccaactatatcaagaattca

SEQ ID NO: 196249 - DNA, 82 bp, Homo sapiens
ctgcctgcacacattatctgagatataattcttctataaaaactttggcaccaactatatcaagaattcatatattagcaca

SEQ ID NO: 196250 - DNA, 79 bp, Homo sapiens
cacattatctgagatataattcttctataaaaactttggcaccaactatatcaagaattcatatattagcacaaatgta

SEQ ID NO: 196251 - DNA, 77 bp, Homo sapiens
ataattcttctataaaaactttggcaccaactatatcaagaattcatatattagcacaaatgtattttgctctggca

SEQ ID NO: 196252 - DNA, 76 bp, Homo sapiens
tataaaaactttggcaccaactatatcaagaattcatatattagcacaaatgtattttgctctggcaccaaaccac

SEQ ID NO: 196253 - DNA, 76 bp, Homo sapiens
aaactttggcaccaactatatcaagaattcatatattagcacaaatgtattttgctctggcaccaaaccactatgt

SEQ ID NO: 196254 - DNA, 76 bp, Homo sapiens
ccaactatatcaagaattcatatattagcacaaatgtattttgctctggcaccaaaccactatgtttacattttag

SEQ ID NO: 196255 - DNA, 76 bp, Homo sapiens
gaattcatatattagcacaaatgtattttgctctggcaccaaaccactatgtttacattttagtaactacagtgag

SEQ ID NO: 196256 - DNA, 76 bp, Homo sapiens
ttagcacaaatgtattttgctctggcaccaaaccactatgtttacattttagtaactacagtgagtcaaatgaatg

SEQ ID NO: 196257 - DNA, 74 bp, Homo sapiens
aaatgtattttgctctggcaccaaaccactatgtttacattttagtaactacagtgagtcaaatgaatggagtc

SEQ ID NO: 196258 - DNA, 72 bp, Homo sapiens
tctggcaccaaaccactatgtttacattttagtaactacagtgagtcaaatgaatggagtcctttggtttta

SEQ ID NO: 196259 - DNA, 69 bp, Homo sapiens
ccaaaccactatgtttacattttagtaactacagtgagtcaaatgaatggagtcctttggttttacgga

SEQ ID NO: 196260 - DNA, 68 bp, Homo sapiens
gtttacattttagtaactacagtgagtcaaatgaatggagtcctttggttttacggaataacaagctt

SEQ ID NO: 196261 - DNA, 63 bp, Homo sapiens
ggagtcctttggttttacggaataacaagcttttataataagtttttgttgtttttctttcat

SEQ ID NO: 196262 - DNA, 69 bp, Homo sapiens
caagcttttataataagtttttgttgtttttctttcattagaaaaagcctatccttcaggatctgatgt

SEQ ID NO: 196263 - DNA, 68 bp, Homo sapiens
ttataataagtttttgttgtttttctttcattagaaaaagcctatccttcaggatctgatgtttaaaa

SEQ ID NO: 196264 - DNA, 71 bp, Homo sapiens
ttgttgtttttctttcattagaaaaagcctatccttcaggatctgatgtttaaaaatactaacattgcttg

SEQ ID NO: 196265 - DNA, 75 bp, Homo sapiens
tctttcattagaaaaagcctatccttcaggatctgatgtttaaaaatactaacattgcttgtcattatactatta

SEQ ID NO: 196266 - DNA, 76 bp, Homo sapiens
cattagaaaaagcctatccttcaggatctgatgtttaaaaatactaacattgcttgtcattatactattatatatg

SEQ ID NO: 196267 - DNA, 79 bp, Homo sapiens
gcctatccttcaggatctgatgtttaaaaatactaacattgcttgtcattatactattatatatgtatactgattgttg

SEQ ID NO: 196268 - DNA, 76 bp, Homo sapiens
taaaaatactaacattgcttgtcattatactattatatatgtatactgattgttggtaatgactccccaaaccata

SEQ ID NO: 196269 - DNA, 78 bp, Homo sapiens
actaacattgcttgtcattatactattatatatgtatactgattgttggtaatgactccccaaaccataattgtatga

SEQ ID NO: 196270 - DNA, 77 bp, Homo sapiens
gcttgtcattatactattatatatgtatactgattgttggtaatgactccccaaaccataattgtatgaaacaagaa

SEQ ID NO: 196271 - DNA, 72 bp, Homo sapiens
atactattatatatgtatactgattgttggtaatgactccccaaaccataattgtatgaaacaagaaaaaaa

SEQ ID NO: 196272 - DNA, 70 bp, Homo sapiens
tatgtatactgattgttggtaatgactccccaaaccataattgtatgaaacaagaaaaaaaatattaaag

SEQ ID NO: 196273 - DNA, 67 bp, Homo sapiens
ctgattgttggtaatgactccccaaaccataattgtatgaaacaagaaaaaaaatattaaagtaact

SEQ ID NO: 196274 - DNA, 66 bp, Homo sapiens
gtaatgactccccaaaccataattgtatgaaacaagaaaaaaaatattaaagtaactttatttgaa

SEQ ID NO: 196275 - DNA, 66 bp, Homo sapiens
aacaagaaaaaaaatattaaagtaactttatttgaaaggaattttagaagcttgtgtgcagagaag

SEQ ID NO: 196276 - DNA, 69 bp, Homo sapiens
aaaatattaaagtaactttatttgaaaggaattttagaagcttgtgtgcagagaagttgtgaggacctg

SEQ ID NO: 196277 - DNA, 71 bp, Homo sapiens
attaaagtaactttatttgaaaggaattttagaagcttgtgtgcagagaagttgtgaggacctggtggaca

SEQ ID NO: 196278 - DNA, 75 bp, Homo sapiens
tttgaaaggaattttagaagcttgtgtgcagagaagttgtgaggacctggtggacaccaattatatgcttaaata

SEQ ID NO: 196279 - DNA, 74 bp, Homo sapiens
aaggaattttagaagcttgtgtgcagagaagttgtgaggacctggtggacaccaattatatgcttaaataaaca

SEQ ID NO: 196280 - DNA, 76 bp, Homo sapiens
gagaagttgtgaggacctggtggacaccaattatatgcttaaataaacacttgaacactactgcaaacacatagta

SEQ ID NO: 196281 - DNA, 77 bp, Homo sapiens
ttgtgaggacctggtggacaccaattatatgcttaaataaacacttgaacactactgcaaacacatagtatgaatat

SEQ ID NO: 196282 - DNA, 79 bp, Homo sapiens
tggacaccaattatatgcttaaataaacacttgaacactactgcaaacacatagtatgaatattgtggacctgtgaatg

SEQ ID NO: 196283 - DNA, 76 bp, Homo sapiens
ccaattatatgcttaaataaacacttgaacactactgcaaacacatagtatgaatattgtggacctgtgaatggtt

SEQ ID NO: 196284 - DNA, 73 bp, Homo sapiens
gcttaaataaacacttgaacactactgcaaacacatagtatgaatattgtggacctgtgaatggttttttaaa

SEQ ID NO: 196285 - DNA, 74 bp, Homo sapiens
aacacttgaacactactgcaaacacatagtatgaatattgtggacctgtgaatggttttttaaatctcacttcc

SEQ ID NO: 196286 - DNA, 72 bp, Homo sapiens
cactactgcaaacacatagtatgaatattgtggacctgtgaatggttttttaaatctcacttcccctaaaaa

SEQ ID NO: 196287 - DNA, 69 bp, Homo sapiens
aacacatagtatgaatattgtggacctgtgaatggttttttaaatctcacttcccctaaaaatggggat

SEQ ID NO: 196288 - DNA, 69 bp, Homo sapiens
tagtatgaatattgtggacctgtgaatggttttttaaatctcacttcccctaaaaatggggatttaata

SEQ ID NO: 196289 - DNA, 67 bp, Homo sapiens
gaatattgtggacctgtgaatggttttttaaatctcacttcccctaaaaatggggatttaatattac

SEQ ID NO: 196290 - DNA, 66 bp, Homo sapiens
attgtggacctgtgaatggttttttaaatctcacttcccctaaaaatggggatttaatattactta

SEQ ID NO: 196291 - DNA, 65 bp, Homo sapiens
ggacctgtgaatggttttttaaatctcacttcccctaaaaatggggatttaatattacttaatat

SEQ ID NO: 196292 - DNA, 66 bp, Homo sapiens
ttttttaaatctcacttcccctaaaaatggggatttaatattacttaatattcaagtaatttagca

SEQ ID NO: 196293 - DNA, 69 bp, Homo sapiens
ctcacttcccctaaaaatggggatttaatattacttaatattcaagtaatttagcagacaacgatgcct

SEQ ID NO: 196294 - DNA, 71 bp, Homo sapiens
aaatggggatttaatattacttaatattcaagtaatttagcagacaacgatgcctttgataagaataggaa

SEQ ID NO: 196295 - DNA, 73 bp, Homo sapiens
taatattacttaatattcaagtaatttagcagacaacgatgcctttgataagaataggaaaaaagccacacat

SEQ ID NO: 196296 - DNA, 74 bp, Homo sapiens
taatattcaagtaatttagcagacaacgatgcctttgataagaataggaaaaaagccacacatttaatttcatc

SEQ ID NO: 196297 - DNA, 75 bp, Homo sapiens
caagtaatttagcagacaacgatgcctttgataagaataggaaaaaagccacacatttaatttcatcttcatcca

SEQ ID NO: 196298 - DNA, 73 bp, Homo sapiens
agacaacgatgcctttgataagaataggaaaaaagccacacatttaatttcatcttcatccagtttggcctag

SEQ ID NO: 196299 - DNA, 73 bp, Homo sapiens
acgatgcctttgataagaataggaaaaaagccacacatttaatttcatcttcatccagtttggcctaggaaca

SEQ ID NO: 196300 - DNA, 72 bp, Homo sapiens
agaataggaaaaaagccacacatttaatttcatcttcatccagtttggcctaggaacaccacaaatcttaca

SEQ ID NO: 196301 - DNA, 73 bp, Homo sapiens
aaaaagccacacatttaatttcatcttcatccagtttggcctaggaacaccacaaatcttacaggccagttga

SEQ ID NO: 196302 - DNA, 73 bp, Homo sapiens
catttaatttcatcttcatccagtttggcctaggaacaccacaaatcttacaggccagttgatgttcgctttt

SEQ ID NO: 196303 - DNA, 76 bp, Homo sapiens
aatttcatcttcatccagtttggcctaggaacaccacaaatcttacaggccagttgatgttcgctttttcatgctc

SEQ ID NO: 196304 - DNA, 75 bp, Homo sapiens
cagtttggcctaggaacaccacaaatcttacaggccagttgatgttcgctttttcatgctccgtcgctgggctaa

SEQ ID NO: 196305 - DNA, 79 bp, Homo sapiens
acaaatcttacaggccagttgatgttcgctttttcatgctccgtcgctgggctaagcttgaagcagctacaggctctag

SEQ ID NO: 196306 - DNA, 79 bp, Homo sapiens
ttacaggccagttgatgttcgctttttcatgctccgtcgctgggctaagcttgaagcagctacaggctctaggactggt

SEQ ID NO: 196307 - DNA, 78 bp, Homo sapiens
ttgatgttcgctttttcatgctccgtcgctgggctaagcttgaagcagctacaggctctaggactggttgaaaggtct

SEQ ID NO: 196308 - DNA, 79 bp, Homo sapiens
tccgtcgctgggctaagcttgaagcagctacaggctctaggactggttgaaaggtcttgtgagtcagggcagagtatgt

SEQ ID NO: 196309 - DNA, 80 bp, Homo sapiens
tgggctaagcttgaagcagctacaggctctaggactggttgaaaggtcttgtgagtcagggcagagtatgttgcaaccat

SEQ ID NO: 196310 - DNA, 78 bp, Homo sapiens
aagcagctacaggctctaggactggttgaaaggtcttgtgagtcagggcagagtatgttgcaaccattgctccctaaa

SEQ ID NO: 196311 - DNA, 78 bp, Homo sapiens
tacaggctctaggactggttgaaaggtcttgtgagtcagggcagagtatgttgcaaccattgctccctaaagtaatga

SEQ ID NO: 196312 - DNA, 75 bp, Homo sapiens
ctaggactggttgaaaggtcttgtgagtcagggcagagtatgttgcaaccattgctccctaaagtaatgagaaaa

SEQ ID NO: 196313 - DNA, 76 bp, Homo sapiens
attaggtatctgatatctcgaaggcacataaaagtatgtttgttttaccttaacaacatgtgacacatcatttctc

SEQ ID NO: 196314 - DNA, 77 bp, Homo sapiens
atatctcgaaggcacataaaagtatgtttgttttaccttaacaacatgtgacacatcatttctctttggctgatcat

SEQ ID NO: 196315 - DNA, 76 bp, Homo sapiens
aaggcacataaaagtatgtttgttttaccttaacaacatgtgacacatcatttctctttggctgatcatttggcaa

SEQ ID NO: 196316 - DNA, 75 bp, Homo sapiens
ataaaagtatgtttgttttaccttaacaacatgtgacacatcatttctctttggctgatcatttggcaactggtc

SEQ ID NO: 196317 - DNA, 79 bp, Homo sapiens
tttgttttaccttaacaacatgtgacacatcatttctctttggctgatcatttggcaactggtctctgtgagttatcca

SEQ ID NO: 196318 - DNA, 83 bp, Homo sapiens
ttaacaacatgtgacacatcatttctctttggctgatcatttggcaactggtctctgtgagttatccatgagtgctttaatat

SEQ ID NO: 196319 - DNA, 83 bp, Homo sapiens
acacatcatttctctttggctgatcatttggcaactggtctctgtgagttatccatgagtgctttaatatttgttcagcagta

SEQ ID NO: 196320 - DNA, 80 bp, Homo sapiens
atttctctttggctgatcatttggcaactggtctctgtgagttatccatgagtgctttaatatttgttcagcagtatacc

SEQ ID NO: 196321 - DNA, 84 bp, Homo sapiens
tgatcatttggcaactggtctctgtgagttatccatgagtgctttaatatttgttcagcagtataccgctgatgtgggtccata

SEQ ID NO: 196322 - DNA, 82 bp, Homo sapiens
tttggcaactggtctctgtgagttatccatgagtgctttaatatttgttcagcagtataccgctgatgtgggtccatatgaa

SEQ ID NO: 196323 - DNA, 84 bp, Homo sapiens
tctgtgagttatccatgagtgctttaatatttgttcagcagtataccgctgatgtgggtccatatgaagcatatgggaaagcaa

SEQ ID NO: 196324 - DNA, 82 bp, Homo sapiens
ttatccatgagtgctttaatatttgttcagcagtataccgctgatgtgggtccatatgaagcatatgggaaagcaaatccta

SEQ ID NO: 196325 - DNA, 78 bp, Homo sapiens
tgctttaatatttgttcagcagtataccgctgatgtgggtccatatgaagcatatgggaaagcaaatcctaaattaaa

SEQ ID NO: 196326 - DNA, 75 bp, Homo sapiens
aatatttgttcagcagtataccgctgatgtgggtccatatgaagcatatgggaaagcaaatcctaaattaaaaaa

SEQ ID NO: 196327 - DNA, 75 bp, Homo sapiens
agtataccgctgatgtgggtccatatgaagcatatgggaaagcaaatcctaaattaaaaaaaatgtgtgtgtata

SEQ ID NO: 196328 - DNA, 75 bp, Homo sapiens
tgagcaatttaacatgaatgcaacaaaacaaaacattataatttatacctttgctccgtctgaaatattgtccca

SEQ ID NO: 196329 - DNA, 73 bp, Homo sapiens
catgaatgcaacaaaacaaaacattataatttatacctttgctccgtctgaaatattgtcccagtttccacca

SEQ ID NO: 196330 - DNA, 69 bp, Homo sapiens
acaaaacaaaacattataatttatacctttgctccgtctgaaatattgtcccagtttccaccactcaaa

SEQ ID NO: 196331 - DNA, 71 bp, Homo sapiens
acattataatttatacctttgctccgtctgaaatattgtcccagtttccaccactcaaagagaattttcca

SEQ ID NO: 196332 - DNA, 72 bp, Homo sapiens
taatttatacctttgctccgtctgaaatattgtcccagtttccaccactcaaagagaattttccattgccta

SEQ ID NO: 196333 - DNA, 77 bp, Homo sapiens
ttgctccgtctgaaatattgtcccagtttccaccactcaaagagaattttccattgcctatacgcagcagtatctct

SEQ ID NO: 196334 - DNA, 77 bp, Homo sapiens
aaatattgtcccagtttccaccactcaaagagaattttccattgcctatacgcagcagtatctcttcaggagtatca

SEQ ID NO: 196335 - DNA, 77 bp, Homo sapiens
ttgtcccagtttccaccactcaaagagaattttccattgcctatacgcagcagtatctcttcaggagtatcattggg

SEQ ID NO: 196336 - DNA, 79 bp, Homo sapiens
ttccaccactcaaagagaattttccattgcctatacgcagcagtatctcttcaggagtatcattggggccattagcaaa

SEQ ID NO: 196337 - DNA, 80 bp, Homo sapiens
agaattttccattgcctatacgcagcagtatctcttcaggagtatcattggggccattagcaaatggagtgtagctatta

SEQ ID NO: 196338 - DNA, 80 bp, Homo sapiens
tttccattgcctatacgcagcagtatctcttcaggagtatcattggggccattagcaaatggagtgtagctattaataaa

SEQ ID NO: 196339 - DNA, 78 bp, Homo sapiens
ctatacgcagcagtatctcttcaggagtatcattggggccattagcaaatggagtgtagctattaataaaatagattt

SEQ ID NO: 196340 - DNA, 76 bp, Homo sapiens
gtatctcttcaggagtatcattggggccattagcaaatggagtgtagctattaataaaatagattttaatagacac

SEQ ID NO: 196341 - DNA, 76 bp, Homo sapiens
agatatacagatgaaattcaaataacaatgttaatgcttttgaatatatgtttcttacccagccaacattgtgtaa

SEQ ID NO: 196342 - DNA, 74 bp, Homo sapiens
tacagatgaaattcaaataacaatgttaatgcttttgaatatatgtttcttacccagccaacattgtgtaaaaa

SEQ ID NO: 196343 - DNA, 71 bp, Homo sapiens
caaataacaatgttaatgcttttgaatatatgtttcttacccagccaacattgtgtaaaaaaggactccta

SEQ ID NO: 196344 - DNA, 71 bp, Homo sapiens
atgttaatgcttttgaatatatgtttcttacccagccaacattgtgtaaaaaaggactcctaaactccaga

SEQ ID NO: 196345 - DNA, 78 bp, Homo sapiens
ttgaatatatgtttcttacccagccaacattgtgtaaaaaaggactcctaaactccagatatcacaagcagcatcata

SEQ ID NO: 196346 - DNA, 76 bp, Homo sapiens
atatgtttcttacccagccaacattgtgtaaaaaaggactcctaaactccagatatcacaagcagcatcatatccc

SEQ ID NO: 196347 - DNA, 78 bp, Homo sapiens
agccaacattgtgtaaaaaaggactcctaaactccagatatcacaagcagcatcatatccctgttgcataagaaccta

SEQ ID NO: 196348 - DNA, 76 bp, Homo sapiens
attgtgtaaaaaaggactcctaaactccagatatcacaagcagcatcatatccctgttgcataagaacctaagaaa

SEQ ID NO: 196349 - DNA, 75 bp, Homo sapiens
aaaaaggactcctaaactccagatatcacaagcagcatcatatccctgttgcataagaacctaagaaagaaatac

SEQ ID NO: 196350 - DNA, 80 bp, Homo sapiens
taaactccagatatcacaagcagcatcatatccctgttgcataagaacctaagaaagaaatactcattatatggtgttac

SEQ ID NO: 196351 - DNA, 81 bp, Homo sapiens
tcacaagcagcatcatatccctgttgcataagaacctaagaaagaaatactcattatatggtgttactcaatataaactca

SEQ ID NO: 196352 - DNA, 78 bp, Homo sapiens
agcagcatcatatccctgttgcataagaacctaagaaagaaatactcattatatggtgttactcaatataaactcaat

SEQ ID NO: 196353 - DNA, 69 bp, Homo sapiens
taaaggaaaagaatgaaaggcaaatggtgaagtttttaaggaatacctcaggtgcaacaaagtttgcag

SEQ ID NO: 196354 - DNA, 72 bp, Homo sapiens
aaaagaatgaaaggcaaatggtgaagtttttaaggaatacctcaggtgcaacaaagtttgcagtgtagcatg

SEQ ID NO: 196355 - DNA, 72 bp, Homo sapiens
aaaggcaaatggtgaagtttttaaggaatacctcaggtgcaacaaagtttgcagtgtagcatggagttaaga

SEQ ID NO: 196356 - DNA, 71 bp, Homo sapiens
aagtttttaaggaatacctcaggtgcaacaaagtttgcagtgtagcatggagttaagagaagtccattttc

SEQ ID NO: 196357 - DNA, 74 bp, Homo sapiens
gaatacctcaggtgcaacaaagtttgcagtgtagcatggagttaagagaagtccattttctcctcgaagttgtt

SEQ ID NO: 196358 - DNA, 73 bp, Homo sapiens
aggtgcaacaaagtttgcagtgtagcatggagttaagagaagtccattttctcctcgaagttgttttgcaaac

SEQ ID NO: 196359 - DNA, 70 bp, Homo sapiens
aaagtttgcagtgtagcatggagttaagagaagtccattttctcctcgaagttgttttgcaaacccaaaa

SEQ ID NO: 196360 - DNA, 76 bp, Homo sapiens
tgtagcatggagttaagagaagtccattttctcctcgaagttgttttgcaaacccaaaatcacatatcctgattga

SEQ ID NO: 196361 - DNA, 73 bp, Homo sapiens
atggagttaagagaagtccattttctcctcgaagttgttttgcaaacccaaaatcacatatcctgattgaatc

SEQ ID NO: 196362 - DNA, 78 bp, Homo sapiens
aagtccattttctcctcgaagttgttttgcaaacccaaaatcacatatcctgattgaatctgcactggctgattcatc

SEQ ID NO: 196363 - DNA, 80 bp, Homo sapiens
tcctcgaagttgttttgcaaacccaaaatcacatatcctgattgaatctgcactggctgattcatccatgtataaaatat

SEQ ID NO: 196364 - DNA, 80 bp, Homo sapiens
gaagttgttttgcaaacccaaaatcacatatcctgattgaatctgcactggctgattcatccatgtataaaatattacta

SEQ ID NO: 196365 - DNA, 80 bp, Homo sapiens
caaacccaaaatcacatatcctgattgaatctgcactggctgattcatccatgtataaaatattactaggtttaagatca

SEQ ID NO: 196366 - DNA, 82 bp, Homo sapiens
aaatcacatatcctgattgaatctgcactggctgattcatccatgtataaaatattactaggtttaagatcacgatgaacaa

SEQ ID NO: 196367 - DNA, 81 bp, Homo sapiens
ctgattgaatctgcactggctgattcatccatgtataaaatattactaggtttaagatcacgatgaacaaccttgaatata

SEQ ID NO: 196368 - DNA, 78 bp, Homo sapiens
atctgcactggctgattcatccatgtataaaatattactaggtttaagatcacgatgaacaaccttgaatataaagga

SEQ ID NO: 196369 - DNA, 73 bp, Homo sapiens
gctgattcatccatgtataaaatattactaggtttaagatcacgatgaacaaccttgaatataaaggaaaaaa

SEQ ID NO: 196370 - DNA, 71 bp, Homo sapiens
ccatgtataaaatattactaggtttaagatcacgatgaacaaccttgaatataaaggaaaaaagcattata

SEQ ID NO: 196371 - DNA, 73 bp, Homo sapiens
catgaagatataggtcccagaatagaaagaaaaaagttaactacaacttactccttgacaatgaagatagtca

SEQ ID NO: 196372 - DNA, 69 bp, Homo sapiens
aggtcccagaatagaaagaaaaaagttaactacaacttactccttgacaatgaagatagtcaactgtct

SEQ ID NO: 196373 - DNA, 71 bp, Homo sapiens
gaaagaaaaaagttaactacaacttactccttgacaatgaagatagtcaactgtcttacttattacatata

SEQ ID NO: 196374 - DNA, 76 bp, Homo sapiens
gttaactacaacttactccttgacaatgaagatagtcaactgtcttacttattacatatagtatatcactagcctc

SEQ ID NO: 196375 - DNA, 76 bp, Homo sapiens
tacaacttactccttgacaatgaagatagtcaactgtcttacttattacatatagtatatcactagcctcccgttc

SEQ ID NO: 196376 - DNA, 75 bp, Homo sapiens
tgacaatgaagatagtcaactgtcttacttattacatatagtatatcactagcctcccgttccgagaaacatttt

SEQ ID NO: 196377 - DNA, 73 bp, Homo sapiens
atgaagatagtcaactgtcttacttattacatatagtatatcactagcctcccgttccgagaaacatttttgt

SEQ ID NO: 196378 - DNA, 71 bp, Homo sapiens
actgtcttacttattacatatagtatatcactagcctcccgttccgagaaacatttttgtttgagaatacg

SEQ ID NO: 196379 - DNA, 71 bp, Homo sapiens
ttattacatatagtatatcactagcctcccgttccgagaaacatttttgtttgagaatacggtcaagtaac

SEQ ID NO: 196380 - DNA, 71 bp, Homo sapiens
atatagtatatcactagcctcccgttccgagaaacatttttgtttgagaatacggtcaagtaactctcctc

SEQ ID NO: 196381 - DNA, 68 bp, Homo sapiens
tagcctcccgttccgagaaacatttttgtttgagaatacggtcaagtaactctcctcctttcattaaa

SEQ ID NO: 196382 - DNA, 68 bp, Homo sapiens
tccgagaaacatttttgtttgagaatacggtcaagtaactctcctcctttcattaaatccgtaacaag

SEQ ID NO: 196383 - DNA, 67 bp, Homo sapiens
acatttttgtttgagaatacggtcaagtaactctcctcctttcattaaatccgtaacaaggtaaaca

SEQ ID NO: 196384 - DNA, 72 bp, Homo sapiens
tgtttgagaatacggtcaagtaactctcctcctttcattaaatccgtaacaaggtaaacatatctaccatca

SEQ ID NO: 196385 - DNA, 74 bp, Homo sapiens
gttccaattcataacttcattagcttagctgatacctagatttagaaatacctacatccttcaaagtaataatg

SEQ ID NO: 196386 - DNA, 75 bp, Homo sapiens
cttcattagcttagctgatacctagatttagaaatacctacatccttcaaagtaataatgttgggatgttgtcca

SEQ ID NO: 196387 - DNA, 78 bp, Homo sapiens
ttagctgatacctagatttagaaatacctacatccttcaaagtaataatgttgggatgttgtccatagcgcatcaata

SEQ ID NO: 196388 - DNA, 78 bp, Homo sapiens
tgatacctagatttagaaatacctacatccttcaaagtaataatgttgggatgttgtccatagcgcatcaatatttca

SEQ ID NO: 196389 - DNA, 78 bp, Homo sapiens
tttagaaatacctacatccttcaaagtaataatgttgggatgttgtccatagcgcatcaatatttcaatctcttctga

SEQ ID NO: 196390 - DNA, 79 bp, Homo sapiens
tacatccttcaaagtaataatgttgggatgttgtccatagcgcatcaatatttcaatctcttctgaagggtctcgctta

SEQ ID NO: 196391 - DNA, 75 bp, Homo sapiens
aaagtaataatgttgggatgttgtccatagcgcatcaatatttcaatctcttctgaagggtctcgcttacttttg

SEQ ID NO: 196392 - DNA, 80 bp, Homo sapiens
taatgttgggatgttgtccatagcgcatcaatatttcaatctcttctgaagggtctcgcttacttttgtcaatgatctaa

SEQ ID NO: 196393 - DNA, 78 bp, Homo sapiens
ttgtccatagcgcatcaatatttcaatctcttctgaagggtctcgcttacttttgtcaatgatctaagaaatacgaaa

SEQ ID NO: 196394 - DNA, 76 bp, Homo sapiens
tagcgcatcaatatttcaatctcttctgaagggtctcgcttacttttgtcaatgatctaagaaatacgaaaaaaga

SEQ ID NO: 196395 - DNA, 70 bp, Homo sapiens
atatttcaatctcttctgaagggtctcgcttacttttgtcaatgatctaagaaatacgaaaaaagaaaaa

SEQ ID NO: 196396 - DNA, 72 bp, Homo sapiens
ctcttctgaagggtctcgcttacttttgtcaatgatctaagaaatacgaaaaaagaaaaatatctgaggcaa

SEQ ID NO: 196397 - DNA, 76 bp, Homo sapiens
tttaaattacatgcataaaacaaacaagaaagctaggctcagagacaataccttcactgcaaattccatgttggta

SEQ ID NO: 196398 - DNA, 80 bp, Homo sapiens
taaaacaaacaagaaagctaggctcagagacaataccttcactgcaaattccatgttggtagttgcatgtatgcatcgct

SEQ ID NO: 196399 - DNA, 82 bp, Homo sapiens
aaacaagaaagctaggctcagagacaataccttcactgcaaattccatgttggtagttgcatgtatgcatcgcttgcaaaca

SEQ ID NO: 196400 - DNA, 85 bp, Homo sapiens
taggctcagagacaataccttcactgcaaattccatgttggtagttgcatgtatgcatcgcttgcaaacagagtaggagccaaca

SEQ ID NO: 196401 - DNA, 82 bp, Homo sapiens
acaataccttcactgcaaattccatgttggtagttgcatgtatgcatcgcttgcaaacagagtaggagccaacaccaatatc

SEQ ID NO: 196402 - DNA, 81 bp, Homo sapiens
actgcaaattccatgttggtagttgcatgtatgcatcgcttgcaaacagagtaggagccaacaccaatatcctccttcaat

SEQ ID NO: 196403 - DNA, 82 bp, Homo sapiens
aattccatgttggtagttgcatgtatgcatcgcttgcaaacagagtaggagccaacaccaatatcctccttcaattcatata

SEQ ID NO: 196404 - DNA, 81 bp, Homo sapiens
gtagttgcatgtatgcatcgcttgcaaacagagtaggagccaacaccaatatcctccttcaattcatatacttcaccaaat

SEQ ID NO: 196405 - DNA, 83 bp, Homo sapiens
atgtatgcatcgcttgcaaacagagtaggagccaacaccaatatcctccttcaattcatatacttcaccaaattgtgcagcat

SEQ ID NO: 196406 - DNA, 79 bp, Homo sapiens
ttgcaaacagagtaggagccaacaccaatatcctccttcaattcatatacttcaccaaattgtgcagcatttccattta

SEQ ID NO: 196407 - DNA, 77 bp, Homo sapiens
agtaggagccaacaccaatatcctccttcaattcatatacttcaccaaattgtgcagcatttccatttatctgttta

SEQ ID NO: 196408 - DNA, 75 bp, Homo sapiens
agccaacaccaatatcctccttcaattcatatacttcaccaaattgtgcagcatttccatttatctgtttatttt

SEQ ID NO: 196409 - DNA, 72 bp, Homo sapiens
aatatcctccttcaattcatatacttcaccaaattgtgcagcatttccatttatctgtttatttttaaaaag

SEQ ID NO: 196410 - DNA, 72 bp, Homo sapiens
gaaataattatcccaaaactgaataatgtgattaagtggaatttacctgaacaattggtaatacatttgcac

SEQ ID NO: 196411 - DNA, 74 bp, Homo sapiens
tcccaaaactgaataatgtgattaagtggaatttacctgaacaattggtaatacatttgcacttgtgataggag

SEQ ID NO: 196412 - DNA, 75 bp, Homo sapiens
actgaataatgtgattaagtggaatttacctgaacaattggtaatacatttgcacttgtgataggagtgatttta

SEQ ID NO: 196413 - DNA, 77 bp, Homo sapiens
gtgattaagtggaatttacctgaacaattggtaatacatttgcacttgtgataggagtgattttatattcttctgca

SEQ ID NO: 196414 - DNA, 76 bp, Homo sapiens
gtggaatttacctgaacaattggtaatacatttgcacttgtgataggagtgattttatattcttctgcaatagaag

SEQ ID NO: 196415 - DNA, 80 bp, Homo sapiens
ctgaacaattggtaatacatttgcacttgtgataggagtgattttatattcttctgcaatagaagttgcaacaaagctga

SEQ ID NO: 196416 - DNA, 79 bp, Homo sapiens
gtaatacatttgcacttgtgataggagtgattttatattcttctgcaatagaagttgcaacaaagctgaatcctttgaa

SEQ ID NO: 196417 - DNA, 81 bp, Homo sapiens
acttgtgataggagtgattttatattcttctgcaatagaagttgcaacaaagctgaatcctttgaagagctgatgagcatt

SEQ ID NO: 196418 - DNA, 83 bp, Homo sapiens
ataggagtgattttatattcttctgcaatagaagttgcaacaaagctgaatcctttgaagagctgatgagcatttgcactggc

SEQ ID NO: 196419 - DNA, 82 bp, Homo sapiens
attttatattcttctgcaatagaagttgcaacaaagctgaatcctttgaagagctgatgagcatttgcactggctggcaaac

SEQ ID NO: 196420 - DNA, 83 bp, Homo sapiens
tgcaatagaagttgcaacaaagctgaatcctttgaagagctgatgagcatttgcactggctggcaaaccgggagaatctaatg

SEQ ID NO: 196421 - DNA, 81 bp, Homo sapiens
gttgcaacaaagctgaatcctttgaagagctgatgagcatttgcactggctggcaaaccgggagaatctaatgtccaaata

SEQ ID NO: 196422 - DNA, 78 bp, Homo sapiens
aacaaagctgaatcctttgaagagctgatgagcatttgcactggctggcaaaccgggagaatctaatgtccaaataat

SEQ ID NO: 196423 - DNA, 77 bp, Homo sapiens
aatcctttgaagagctgatgagcatttgcactggctggcaaaccgggagaatctaatgtccaaataattacatttaa

SEQ ID NO: 196424 - DNA, 72 bp, Homo sapiens
atctacttaaataaaatctctgattttacagataaacatgcattacctttaggtgtttttgcagtaaattca

SEQ ID NO: 196425 - DNA, 73 bp, Homo sapiens
ataaaatctctgattttacagataaacatgcattacctttaggtgtttttgcagtaaattcaggatcaaaaca

SEQ ID NO: 196426 - DNA, 71 bp, Homo sapiens
ctctgattttacagataaacatgcattacctttaggtgtttttgcagtaaattcaggatcaaaacaaaaag

SEQ ID NO: 196427 - DNA, 72 bp, Homo sapiens
cagataaacatgcattacctttaggtgtttttgcagtaaattcaggatcaaaacaaaaagtatcatctggtt

SEQ ID NO: 196428 - DNA, 72 bp, Homo sapiens
gcattacctttaggtgtttttgcagtaaattcaggatcaaaacaaaaagtatcatctggttttccagaagca

SEQ ID NO: 196429 - DNA, 69 bp, Homo sapiens
cctttaggtgtttttgcagtaaattcaggatcaaaacaaaaagtatcatctggttttccagaagcaggt

SEQ ID NO: 196430 - DNA, 70 bp, Homo sapiens
ttttgcagtaaattcaggatcaaaacaaaaagtatcatctggttttccagaagcaggtttgaaaggaggt

SEQ ID NO: 196431 - DNA, 69 bp, Homo sapiens
aaattcaggatcaaaacaaaaagtatcatctggttttccagaagcaggtttgaaaggaggttgaacttc

SEQ ID NO: 196432 - DNA, 69 bp, Homo sapiens
caaaacaaaaagtatcatctggttttccagaagcaggtttgaaaggaggttgaacttctcttttatata

SEQ ID NO: 196433 - DNA, 70 bp, Homo sapiens
gtatcatctggttttccagaagcaggtttgaaaggaggttgaacttctcttttatataatttctagaagg

SEQ ID NO: 196434 - DNA, 70 bp, Homo sapiens
ttccagaagcaggtttgaaaggaggttgaacttctcttttatataatttctagaagggacaaccagataa

SEQ ID NO: 196435 - DNA, 70 bp, Homo sapiens
gaagcaggtttgaaaggaggttgaacttctcttttatataatttctagaagggacaaccagataacacaa

SEQ ID NO: 196436 - DNA, 73 bp, Homo sapiens
ataaatctttaatatcctgtgttggtcatatgaagttattcaataacaagctttctacttaacttacatccca

SEQ ID NO: 196437 - DNA, 77 bp, Homo sapiens
taatatcctgtgttggtcatatgaagttattcaataacaagctttctacttaacttacatcccagtcaatatttgca

SEQ ID NO: 196438 - DNA, 74 bp, Homo sapiens
cctgtgttggtcatatgaagttattcaataacaagctttctacttaacttacatcccagtcaatatttgcaaaa

SEQ ID NO: 196439 - DNA, 74 bp, Homo sapiens
catatgaagttattcaataacaagctttctacttaacttacatcccagtcaatatttgcaaaaaacagatgtct

SEQ ID NO: 196440 - DNA, 73 bp, Homo sapiens
tattcaataacaagctttctacttaacttacatcccagtcaatatttgcaaaaaacagatgtcttttgatttc

SEQ ID NO: 196441 - DNA, 72 bp, Homo sapiens
caagctttctacttaacttacatcccagtcaatatttgcaaaaaacagatgtcttttgatttcttcaactcc

SEQ ID NO: 196442 - DNA, 73 bp, Homo sapiens
acttaacttacatcccagtcaatatttgcaaaaaacagatgtcttttgatttcttcaactccttctgatccta

SEQ ID NO: 196443 - DNA, 72 bp, Homo sapiens
acatcccagtcaatatttgcaaaaaacagatgtcttttgatttcttcaactccttctgatcctataaaaaaa

SEQ ID NO: 196444 - DNA, 72 bp, Homo sapiens
caatatttgcaaaaaacagatgtcttttgatttcttcaactccttctgatcctataaaaaaaagaaatgata

SEQ ID NO: 196445 - DNA, 68 bp, Homo sapiens
aaaaacagatgtcttttgatttcttcaactccttctgatcctataaaaaaaagaaatgatattttatt

SEQ ID NO: 196446 - DNA, 73 bp, Homo sapiens
tcctcccaaaacatgcagttacttctataaaagctaagaaaataagcaatacccaatctatttgctggattcc

SEQ ID NO: 196447 - DNA, 71 bp, Homo sapiens
ccaaaacatgcagttacttctataaaagctaagaaaataagcaatacccaatctatttgctggattccttt

SEQ ID NO: 196448 - DNA, 71 bp, Homo sapiens
gttacttctataaaagctaagaaaataagcaatacccaatctatttgctggattccttttgaataacatcc

SEQ ID NO: 196449 - DNA, 71 bp, Homo sapiens
aagctaagaaaataagcaatacccaatctatttgctggattccttttgaataacatccttagaagactttg

SEQ ID NO: 196450 - DNA, 75 bp, Homo sapiens
aataagcaatacccaatctatttgctggattccttttgaataacatccttagaagactttgtgcttcagcactaa

SEQ ID NO: 196451 - DNA, 75 bp, Homo sapiens
atacccaatctatttgctggattccttttgaataacatccttagaagactttgtgcttcagcactaagaaattga

SEQ ID NO: 196452 - DNA, 77 bp, Homo sapiens
tctatttgctggattccttttgaataacatccttagaagactttgtgcttcagcactaagaaattgaggcattccaa

SEQ ID NO: 196453 - DNA, 74 bp, Homo sapiens
attccttttgaataacatccttagaagactttgtgcttcagcactaagaaattgaggcattccaagttttgctc

SEQ ID NO: 196454 - DNA, 77 bp, Homo sapiens
ttgaataacatccttagaagactttgtgcttcagcactaagaaattgaggcattccaagttttgctctgaaacagag

SEQ ID NO: 196455 - DNA, 75 bp, Homo sapiens
ttagaagactttgtgcttcagcactaagaaattgaggcattccaagttttgctctgaaacagaggattttagaaa

SEQ ID NO: 196456 - DNA, 74 bp, Homo sapiens
actttgtgcttcagcactaagaaattgaggcattccaagttttgctctgaaacagaggattttagaaagtttca

SEQ ID NO: 196457 - DNA, 71 bp, Homo sapiens
cagcactaagaaattgaggcattccaagttttgctctgaaacagaggattttagaaagtttcacttaaatt

SEQ ID NO: 196458 - DNA, 65 bp, Homo sapiens
ttttcaaaactgaaagcaagagatttttttcccaaaagaaaaacatactgtttacacttacttta

SEQ ID NO: 196459 - DNA, 70 bp, Homo sapiens
ctgaaagcaagagatttttttcccaaaagaaaaacatactgtttacacttactttaatatcatattcatg

SEQ ID NO: 196460 - DNA, 71 bp, Homo sapiens
gcaagagatttttttcccaaaagaaaaacatactgtttacacttactttaatatcatattcatggtctcat

SEQ ID NO: 196461 - DNA, 70 bp, Homo sapiens
cccaaaagaaaaacatactgtttacacttactttaatatcatattcatggtctcatttctgtctttacct

SEQ ID NO: 196462 - DNA, 75 bp, Homo sapiens
aaacatactgtttacacttactttaatatcatattcatggtctcatttctgtctttaccttgaaatggcagagta

SEQ ID NO: 196463 - DNA, 76 bp, Homo sapiens
gtttacacttactttaatatcatattcatggtctcatttctgtctttaccttgaaatggcagagtaccagtaagca

SEQ ID NO: 196464 - DNA, 76 bp, Homo sapiens
acttactttaatatcatattcatggtctcatttctgtctttaccttgaaatggcagagtaccagtaagcatttcaa

SEQ ID NO: 196465 - DNA, 75 bp, Homo sapiens
atcatattcatggtctcatttctgtctttaccttgaaatggcagagtaccagtaagcatttcaaactaaaacaaa

SEQ ID NO: 196466 - DNA, 78 bp, Homo sapiens
aatatcaatcacaggttggcataattaaaacaaataatgctacttaccataagaacaccatatgaccaccaatcagca

SEQ ID NO: 196467 - DNA, 77 bp, Homo sapiens
aatcagcactctgggaatggcctctcctatttactacttcaggagccatatactctactgtaccacaaaatgagtaa

SEQ ID NO: 196468 - DNA, 74 bp, Homo sapiens
tgggaatggcctctcctatttactacttcaggagccatatactctactgtaccacaaaatgagtaagccttctt

SEQ ID NO: 196469 - DNA, 73 bp, Homo sapiens
atggcctctcctatttactacttcaggagccatatactctactgtaccacaaaatgagtaagccttcttttct

SEQ ID NO: 196470 - DNA, 76 bp, Homo sapiens
tatttactacttcaggagccatatactctactgtaccacaaaatgagtaagccttcttttcttgatctactgactc

SEQ ID NO: 196471 - DNA, 77 bp, Homo sapiens
aggagccatatactctactgtaccacaaaatgagtaagccttcttttcttgatctactgactccttgctgagtccaa

SEQ ID NO: 196472 - DNA, 77 bp, Homo sapiens
tatactctactgtaccacaaaatgagtaagccttcttttcttgatctactgactccttgctgagtccaaaatctata

SEQ ID NO: 196473 - DNA, 75 bp, Homo sapiens
taccacaaaatgagtaagccttcttttcttgatctactgactccttgctgagtccaaaatctataataacagtat

SEQ ID NO: 196474 - DNA, 74 bp, Homo sapiens
aaatgagtaagccttcttttcttgatctactgactccttgctgagtccaaaatctataataacagtattaccaa

SEQ ID NO: 196475 - DNA, 74 bp, Homo sapiens
gccttcttttcttgatctactgactccttgctgagtccaaaatctataataacagtattaccaaaaaatgtgtc

SEQ ID NO: 196476 - DNA, 71 bp, Homo sapiens
aaaataataaaaaatatgaatcaagtggctaagggtataataagaaaatctgcatacctgttaatttgata

SEQ ID NO: 196477 - DNA, 76 bp, Homo sapiens
aaaatatgaatcaagtggctaagggtataataagaaaatctgcatacctgttaatttgatatgtcctatttcatca

SEQ ID NO: 196478 - DNA, 78 bp, Homo sapiens
tcaagtggctaagggtataataagaaaatctgcatacctgttaatttgatatgtcctatttcatcaagcaaaatgctg

SEQ ID NO: 196479 - DNA, 77 bp, Homo sapiens
tggctaagggtataataagaaaatctgcatacctgttaatttgatatgtcctatttcatcaagcaaaatgctgtaaa

SEQ ID NO: 196480 - DNA, 79 bp, Homo sapiens
ataagaaaatctgcatacctgttaatttgatatgtcctatttcatcaagcaaaatgctgtaaatcaaaattcacattca

SEQ ID NO: 196481 - DNA, 80 bp, Homo sapiens
ctgcatacctgttaatttgatatgtcctatttcatcaagcaaaatgctgtaaatcaaaattcacattcaacaagatggaa

SEQ ID NO: 196482 - DNA, 77 bp, Homo sapiens
acctgttaatttgatatgtcctatttcatcaagcaaaatgctgtaaatcaaaattcacattcaacaagatggaataa

SEQ ID NO: 196483 - DNA, 78 bp, Homo sapiens
ttgatatgtcctatttcatcaagcaaaatgctgtaaatcaaaattcacattcaacaagatggaataaaatattttaca

SEQ ID NO: 196484 - DNA, 75 bp, Homo sapiens
ctatttcatcaagcaaaatgctgtaaatcaaaattcacattcaacaagatggaataaaatattttacataaaaca

SEQ ID NO: 196485 - DNA, 73 bp, Homo sapiens
aagcaaaatgctgtaaatcaaaattcacattcaacaagatggaataaaatattttacataaaacatttacata

SEQ ID NO: 196486 - DNA, 74 bp, Homo sapiens
gcagttccagaaatacagacaacatgaaaacaaaagaatacagctttacttttctggcttcaggtctctataaa

SEQ ID NO: 196487 - DNA, 72 bp, Homo sapiens
gaaatacagacaacatgaaaacaaaagaatacagctttacttttctggcttcaggtctctataaacaattcc

SEQ ID NO: 196488 - DNA, 75 bp, Homo sapiens
catgaaaacaaaagaatacagctttacttttctggcttcaggtctctataaacaattcctaattggtgcagatga

SEQ ID NO: 196489 - DNA, 74 bp, Homo sapiens
acaaaagaatacagctttacttttctggcttcaggtctctataaacaattcctaattggtgcagatgatccaaa

SEQ ID NO: 196490 - DNA, 74 bp, Homo sapiens
ctttacttttctggcttcaggtctctataaacaattcctaattggtgcagatgatccaaagcaagggccagttc

SEQ ID NO: 196491 - DNA, 77 bp, Homo sapiens
ctggcttcaggtctctataaacaattcctaattggtgcagatgatccaaagcaagggccagttctgcgaggtagaat

SEQ ID NO: 196492 - DNA, 78 bp, Homo sapiens
ttcaggtctctataaacaattcctaattggtgcagatgatccaaagcaagggccagttctgcgaggtagaatttcaca

SEQ ID NO: 196493 - DNA, 78 bp, Homo sapiens
taaacaattcctaattggtgcagatgatccaaagcaagggccagttctgcgaggtagaatttcacatcttcctctgta

SEQ ID NO: 196494 - DNA, 78 bp, Homo sapiens
taattggtgcagatgatccaaagcaagggccagttctgcgaggtagaatttcacatcttcctctgtaaacagaaccta

SEQ ID NO: 196495 - DNA, 74 bp, Homo sapiens
atgatccaaagcaagggccagttctgcgaggtagaatttcacatcttcctctgtaaacagaacctagaacaaaa

SEQ ID NO: 196496 - DNA, 73 bp, Homo sapiens
aaagcaagggccagttctgcgaggtagaatttcacatcttcctctgtaaacagaacctagaacaaaataatga

SEQ ID NO: 196497 - DNA, 76 bp, Homo sapiens
cagttctgcgaggtagaatttcacatcttcctctgtaaacagaacctagaacaaaataatgatttatcatttgatc

SEQ ID NO: 196498 - DNA, 74 bp, Homo sapiens
gcgaggtagaatttcacatcttcctctgtaaacagaacctagaacaaaataatgatttatcatttgatctttct

SEQ ID NO: 196499 - DNA, 72 bp, Homo sapiens
atgtactaatttatcatcttttgggtaacgcatttaaaatgcttgctcttacctaatattccagacttagga

SEQ ID NO: 196500 - DNA, 71 bp, Homo sapiens
ttatcatcttttgggtaacgcatttaaaatgcttgctcttacctaatattccagacttaggaatcaaaact

SEQ ID NO: 196501 - DNA, 73 bp, Homo sapiens
tttgggtaacgcatttaaaatgcttgctcttacctaatattccagacttaggaatcaaaacttactgactgca

SEQ ID NO: 196502 - DNA, 78 bp, Homo sapiens
catttaaaatgcttgctcttacctaatattccagacttaggaatcaaaacttactgactgcatctctgtgctagtatg

SEQ ID NO: 196503 - DNA, 77 bp, Homo sapiens
aatgcttgctcttacctaatattccagacttaggaatcaaaacttactgactgcatctctgtgctagtatgggttta

SEQ ID NO: 196504 - DNA, 76 bp, Homo sapiens
ttacctaatattccagacttaggaatcaaaacttactgactgcatctctgtgctagtatgggtttagatagtccca

SEQ ID NO: 196505 - DNA, 78 bp, Homo sapiens
atattccagacttaggaatcaaaacttactgactgcatctctgtgctagtatgggtttagatagtcccacatcgagaa

SEQ ID NO: 196506 - DNA, 79 bp, Homo sapiens
ttaggaatcaaaacttactgactgcatctctgtgctagtatgggtttagatagtcccacatcgagaatggaggtctgaa

SEQ ID NO: 196507 - DNA, 77 bp, Homo sapiens
aaacttactgactgcatctctgtgctagtatgggtttagatagtcccacatcgagaatggaggtctgaagagtttaa

SEQ ID NO: 196508 - DNA, 75 bp, Homo sapiens
actgcatctctgtgctagtatgggtttagatagtcccacatcgagaatggaggtctgaagagtttaaaagaaaat

SEQ ID NO: 196509 - DNA, 72 bp, Homo sapiens
ctgtgctagtatgggtttagatagtcccacatcgagaatggaggtctgaagagtttaaaagaaaattagaaa

SEQ ID NO: 196510 - DNA, 71 bp, Homo sapiens
atgggtttagatagtcccacatcgagaatggaggtctgaagagtttaaaagaaaattagaaatgactacaa

SEQ ID NO: 196511 - DNA, 66 bp, Homo sapiens
agtgatttttcttagttttgttttaagaaaatacagtaaaaatgtacagatacttacctctttgga

SEQ ID NO: 196512 - DNA, 68 bp, Homo sapiens
cttagttttgttttaagaaaatacagtaaaaatgtacagatacttacctctttggataatcttgtgaa

SEQ ID NO: 196513 - DNA, 70 bp, Homo sapiens
tttaagaaaatacagtaaaaatgtacagatacttacctctttggataatcttgtgaaaacatctcctccc

SEQ ID NO: 196514 - DNA, 73 bp, Homo sapiens
tacagtaaaaatgtacagatacttacctctttggataatcttgtgaaaacatctcctcccctgagaaaatcca

SEQ ID NO: 196515 - DNA, 72 bp, Homo sapiens
aaatgtacagatacttacctctttggataatcttgtgaaaacatctcctcccctgagaaaatccagtattaa

SEQ ID NO: 196516 - DNA, 70 bp, Homo sapiens
atacttacctctttggataatcttgtgaaaacatctcctcccctgagaaaatccagtattaagtacagtt

SEQ ID NO: 196517 - DNA, 73 bp, Homo sapiens
tttggataatcttgtgaaaacatctcctcccctgagaaaatccagtattaagtacagtttcccttcagtctga

SEQ ID NO: 196518 - DNA, 71 bp, Homo sapiens
ttgtgaaaacatctcctcccctgagaaaatccagtattaagtacagtttcccttcagtctgaaaggctaat

SEQ ID NO: 196519 - DNA, 68 bp, Homo sapiens
atctcctcccctgagaaaatccagtattaagtacagtttcccttcagtctgaaaggctaattaaaaat

SEQ ID NO: 196520 - DNA, 69 bp, Homo sapiens
ccctgagaaaatccagtattaagtacagtttcccttcagtctgaaaggctaattaaaaattagaatata

SEQ ID NO: 196521 - DNA, 69 bp, Homo sapiens
ccagtattaagtacagtttcccttcagtctgaaaggctaattaaaaattagaatatagtaacaggataa

SEQ ID NO: 196522 - DNA, 70 bp, Homo sapiens
gtacagtttcccttcagtctgaaaggctaattaaaaattagaatatagtaacaggataatctcaaaggct

SEQ ID NO: 196523 - DNA, 71 bp, Homo sapiens
ataaataaaagaataaaaaaagattacataccatagtgcaatttgacaataaatggatgatttacttccac

SEQ ID NO: 196524 - DNA, 74 bp, Homo sapiens
gaataaaaaaagattacataccatagtgcaatttgacaataaatggatgatttacttccaccagtatatccctc

SEQ ID NO: 196525 - DNA, 76 bp, Homo sapiens
aaagattacataccatagtgcaatttgacaataaatggatgatttacttccaccagtatatccctctccatctttg

SEQ ID NO: 196526 - DNA, 76 bp, Homo sapiens
ataccatagtgcaatttgacaataaatggatgatttacttccaccagtatatccctctccatctttgtccgaactc

SEQ ID NO: 196527 - DNA, 75 bp, Homo sapiens
atttgacaataaatggatgatttacttccaccagtatatccctctccatctttgtccgaactctgtctcgaacta

SEQ ID NO: 196528 - DNA, 72 bp, Homo sapiens
aaatggatgatttacttccaccagtatatccctctccatctttgtccgaactctgtctcgaactaaaaatta

SEQ ID NO: 196529 - DNA, 72 bp, Homo sapiens
atgatttacttccaccagtatatccctctccatctttgtccgaactctgtctcgaactaaaaattacataaa

SEQ ID NO: 196530 - DNA, 71 bp, Homo sapiens
accagtatatccctctccatctttgtccgaactctgtctcgaactaaaaattacataaaggtacaatatat

SEQ ID NO: 196531 - DNA, 74 bp, Homo sapiens
tatccctctccatctttgtccgaactctgtctcgaactaaaaattacataaaggtacaatatattgctctctta

SEQ ID NO: 196532 - DNA, 66 bp, Homo sapiens
gcatatttcttaaactacactttgtcaaattctattttaataaactttctaattttctacctttta

SEQ ID NO: 196533 - DNA, 64 bp, Homo sapiens
taaactacactttgtcaaattctattttaataaactttctaattttctaccttttaaagaggct

SEQ ID NO: 196534 - DNA, 62 bp, Homo sapiens
tcaaattctattttaataaactttctaattttctaccttttaaagaggctttttttaacacc

SEQ ID NO: 196535 - DNA, 66 bp, Homo sapiens
tttaataaactttctaattttctaccttttaaagaggctttttttaacaccttcattgcatagagc

SEQ ID NO: 196536 - DNA, 71 bp, Homo sapiens
aactttctaattttctaccttttaaagaggctttttttaacaccttcattgcatagagctgcccagcatca

SEQ ID NO: 196537 - DNA, 72 bp, Homo sapiens
tctaccttttaaagaggctttttttaacaccttcattgcatagagctgcccagcatcaggaccggtcttctt

SEQ ID NO: 196538 - DNA, 73 bp, Homo sapiens
tttaaagaggctttttttaacaccttcattgcatagagctgcccagcatcaggaccggtcttctttctaacaa

SEQ ID NO: 196539 - DNA, 73 bp, Homo sapiens
tttttaacaccttcattgcatagagctgcccagcatcaggaccggtcttctttctaacaagaaaaacctaata

SEQ ID NO: 196540 - DNA, 73 bp, Homo sapiens
aacaccttcattgcatagagctgcccagcatcaggaccggtcttctttctaacaagaaaaacctaatagaaaa

SEQ ID NO: 196541 - DNA, 70 bp, Homo sapiens
atagagctgcccagcatcaggaccggtcttctttctaacaagaaaaacctaatagaaaattgaacaaaaa

SEQ ID NO: 196542 - DNA, 67 bp, Homo sapiens
ctgcccagcatcaggaccggtcttctttctaacaagaaaaacctaatagaaaattgaacaaaaaaaa

SEQ ID NO: 196543 - DNA, 66 bp, Homo sapiens
tttgctaaatgtttagaagaggaacaaatggggaaaaaaattattcattacctttccaaatgaccc

SEQ ID NO: 196544 - DNA, 66 bp, Homo sapiens
tagaagaggaacaaatggggaaaaaaattattcattacctttccaaatgacccctgaccaagaacc

SEQ ID NO: 196545 - DNA, 67 bp, Homo sapiens
aaatggggaaaaaaattattcattacctttccaaatgacccctgaccaagaaccttgagcaactcaa

SEQ ID NO: 196546 - DNA, 73 bp, Homo sapiens
aaaaattattcattacctttccaaatgacccctgaccaagaaccttgagcaactcaaactgtgcaggatctgc

SEQ ID NO: 196547 - DNA, 77 bp, Homo sapiens
ttattcattacctttccaaatgacccctgaccaagaaccttgagcaactcaaactgtgcaggatctgctttctcata

SEQ ID NO: 196548 - DNA, 76 bp, Homo sapiens
tttccaaatgacccctgaccaagaaccttgagcaactcaaactgtgcaggatctgctttctcatagccttccttaa

SEQ ID NO: 196549 - DNA, 79 bp, Homo sapiens
ccctgaccaagaaccttgagcaactcaaactgtgcaggatctgctttctcatagccttccttaacatgatgagtaatag

SEQ ID NO: 196550 - DNA, 77 bp, Homo sapiens
aaccttgagcaactcaaactgtgcaggatctgctttctcatagccttccttaacatgatgagtaatagggatttctt

SEQ ID NO: 196551 - DNA, 76 bp, Homo sapiens
aactcaaactgtgcaggatctgctttctcatagccttccttaacatgatgagtaatagggatttctttaacaactc

SEQ ID NO: 196552 - DNA, 76 bp, Homo sapiens
aaactgtgcaggatctgctttctcatagccttccttaacatgatgagtaatagggatttctttaacaactccttca

SEQ ID NO: 196553 - DNA, 74 bp, Homo sapiens
tgctttctcatagccttccttaacatgatgagtaatagggatttctttaacaactccttcatcctgtaaaaaga

SEQ ID NO: 196554 - DNA, 72 bp, Homo sapiens
ctcatagccttccttaacatgatgagtaatagggatttctttaacaactccttcatcctgtaaaaagaaatc

SEQ ID NO: 196555 - DNA, 71 bp, Homo sapiens
tccttaacatgatgagtaatagggatttctttaacaactccttcatcctgtaaaaagaaatccaaacaata

SEQ ID NO: 196556 - DNA, 72 bp, Homo sapiens
tgatgagtaatagggatttctttaacaactccttcatcctgtaaaaagaaatccaaacaatacttgaatcca

SEQ ID NO: 196557 - DNA, 75 bp, Homo sapiens
gaaaaagtatgaaggctcaaccacaaccaaaatagtatgttctgacctctataatctgtgatcatctttttaatc

SEQ ID NO: 196558 - DNA, 76 bp, Homo sapiens
agtatgaaggctcaaccacaaccaaaatagtatgttctgacctctataatctgtgatcatctttttaatccagagg

SEQ ID NO: 196559 - DNA, 77 bp, Homo sapiens
ccacaaccaaaatagtatgttctgacctctataatctgtgatcatctttttaatccagagggccaacagtgctgtaa

SEQ ID NO: 196560 - DNA, 77 bp, Homo sapiens
aatagtatgttctgacctctataatctgtgatcatctttttaatccagagggccaacagtgctgtaacactgggaaa

SEQ ID NO: 196561 - DNA, 78 bp, Homo sapiens
tatgttctgacctctataatctgtgatcatctttttaatccagagggccaacagtgctgtaacactgggaaaacacac

SEQ ID NO: 196562 - DNA, 76 bp, Homo sapiens
tataatctgtgatcatctttttaatccagagggccaacagtgctgtaacactgggaaaacacactgttaaagtaca

SEQ ID NO: 196563 - DNA, 72 bp, Homo sapiens
atcatctttttaatccagagggccaacagtgctgtaacactgggaaaacacactgttaaagtacaaaatgaa

SEQ ID NO: 196564 - DNA, 72 bp, Homo sapiens
ttttaatccagagggccaacagtgctgtaacactgggaaaacacactgttaaagtacaaaatgaactgtcaa

SEQ ID NO: 196565 - DNA, 72 bp, Homo sapiens
agagggccaacagtgctgtaacactgggaaaacacactgttaaagtacaaaatgaactgtcaaatctactat

SEQ ID NO: 196566 - DNA, 76 bp, Homo sapiens
gctgtaacactgggaaaacacactgttaaagtacaaaatgaactgtcaaatctactattgctccattcatttgata

SEQ ID NO: 196567 - DNA, 75 bp, Homo sapiens
acactgggaaaacacactgttaaagtacaaaatgaactgtcaaatctactattgctccattcatttgataactga

SEQ ID NO: 196568 - DNA, 75 bp, Homo sapiens
acacactgttaaagtacaaaatgaactgtcaaatctactattgctccattcatttgataactgatttgtttagga

SEQ ID NO: 196569 - DNA, 77 bp, Homo sapiens
gtacaaaatgaactgtcaaatctactattgctccattcatttgataactgatttgtttaggaagatggaatcacctg

SEQ ID NO: 196570 - DNA, 77 bp, Homo sapiens
gaactgtcaaatctactattgctccattcatttgataactgatttgtttaggaagatggaatcacctgttaattgaa

SEQ ID NO: 196571 - DNA, 76 bp, Homo sapiens
caaatctactattgctccattcatttgataactgatttgtttaggaagatggaatcacctgttaattgaaaagaga

SEQ ID NO: 196572 - DNA, 78 bp, Homo sapiens
tgctccattcatttgataactgatttgtttaggaagatggaatcacctgttaattgaaaagagaaaaagctgatgaca

SEQ ID NO: 196573 - DNA, 74 bp, Homo sapiens
catttgataactgatttgtttaggaagatggaatcacctgttaattgaaaagagaaaaagctgatgacaaccta

SEQ ID NO: 196574 - DNA, 70 bp, Homo sapiens
ctttccctgtattctttttccttatatgctaaaaatgtggcttaataaattaacataaatacttacatga

SEQ ID NO: 196575 - DNA, 73 bp, Homo sapiens
gtattctttttccttatatgctaaaaatgtggcttaataaattaacataaatacttacatgacaagaatctgc

SEQ ID NO: 196576 - DNA, 75 bp, Homo sapiens
tccttatatgctaaaaatgtggcttaataaattaacataaatacttacatgacaagaatctgcttctccctcttc

SEQ ID NO: 196577 - DNA, 76 bp, Homo sapiens
gctaaaaatgtggcttaataaattaacataaatacttacatgacaagaatctgcttctccctcttccattggctca

SEQ ID NO: 196578 - DNA, 76 bp, Homo sapiens
tggcttaataaattaacataaatacttacatgacaagaatctgcttctccctcttccattggctcatcaaccattt

SEQ ID NO: 196579 - DNA, 76 bp, Homo sapiens
ttaacataaatacttacatgacaagaatctgcttctccctcttccattggctcatcaaccattttaagaccattta

SEQ ID NO: 196580 - DNA, 76 bp, Homo sapiens
taaatacttacatgacaagaatctgcttctccctcttccattggctcatcaaccattttaagaccatttacctgaa

SEQ ID NO: 196581 - DNA, 74 bp, Homo sapiens
atgacaagaatctgcttctccctcttccattggctcatcaaccattttaagaccatttacctgaaaaacattgt

SEQ ID NO: 196582 - DNA, 71 bp, Homo sapiens
cttctccctcttccattggctcatcaaccattttaagaccatttacctgaaaaacattgttcaaaaattga

SEQ ID NO: 196583 - DNA, 69 bp, Homo sapiens
ccctcttccattggctcatcaaccattttaagaccatttacctgaaaaacattgttcaaaaattgaggt

SEQ ID NO: 196584 - DNA, 69 bp, Homo sapiens
ttggctcatcaaccattttaagaccatttacctgaaaaacattgttcaaaaattgaggttcaaaagtat

SEQ ID NO: 196585 - DNA, 65 bp, Homo sapiens
accattttaagaccatttacctgaaaaacattgttcaaaaattgaggttcaaaagtattaaaaca

SEQ ID NO: 196586 - DNA, 70 bp, Homo sapiens
actgttttagagaaagaaggcagaaatactatcttcaccacattaccttcacctttcgttttacttcata

SEQ ID NO: 196587 - DNA, 70 bp, Homo sapiens
agaaagaaggcagaaatactatcttcaccacattaccttcacctttcgttttacttcatagggattaaca

SEQ ID NO: 196588 - DNA, 70 bp, Homo sapiens
cagaaatactatcttcaccacattaccttcacctttcgttttacttcatagggattaacaatttccactc

SEQ ID NO: 196589 - DNA, 70 bp, Homo sapiens
atactatcttcaccacattaccttcacctttcgttttacttcatagggattaacaatttccactcgagta

SEQ ID NO: 196590 - DNA, 68 bp, Homo sapiens
caccacattaccttcacctttcgttttacttcatagggattaacaatttccactcgagtatttttcca

SEQ ID NO: 196591 - DNA, 70 bp, Homo sapiens
tcacctttcgttttacttcatagggattaacaatttccactcgagtatttttccaaattgctgaggtaga

SEQ ID NO: 196592 - DNA, 72 bp, Homo sapiens
ttacttcatagggattaacaatttccactcgagtatttttccaaattgctgaggtagagagacccattgtta

SEQ ID NO: 196593 - DNA, 72 bp, Homo sapiens
tagggattaacaatttccactcgagtatttttccaaattgctgaggtagagagacccattgttaaatctcta

SEQ ID NO: 196594 - DNA, 71 bp, Homo sapiens
aatttccactcgagtatttttccaaattgctgaggtagagagacccattgttaaatctctacaatacctaa

SEQ ID NO: 196595 - DNA, 71 bp, Homo sapiens
actcgagtatttttccaaattgctgaggtagagagacccattgttaaatctctacaatacctaaaacatac

SEQ ID NO: 196596 - DNA, 73 bp, Homo sapiens
ttccaaattgctgaggtagagagacccattgttaaatctctacaatacctaaaacatactgcaaacaataaaa

SEQ ID NO: 196597 - DNA, 72 bp, Homo sapiens
ttgctgaggtagagagacccattgttaaatctctacaatacctaaaacatactgcaaacaataaaaaaacca

SEQ ID NO: 196598 - DNA, 71 bp, Homo sapiens
agagagacccattgttaaatctctacaatacctaaaacatactgcaaacaataaaaaaaccatatgtggta

SEQ ID NO: 196599 - DNA, 75 bp, Homo sapiens
ttgaagacaaagttgcaccctttagatgtcgaggattgagagtcttacctcaaaatatcctactgtgaatcaatt

SEQ ID NO: 196600 - DNA, 74 bp, Homo sapiens
aaagttgcaccctttagatgtcgaggattgagagtcttacctcaaaatatcctactgtgaatcaatttcaccaa

SEQ ID NO: 196601 - DNA, 72 bp, Homo sapiens
ccctttagatgtcgaggattgagagtcttacctcaaaatatcctactgtgaatcaatttcaccaactatttt

SEQ ID NO: 196602 - DNA, 72 bp, Homo sapiens
aggattgagagtcttacctcaaaatatcctactgtgaatcaatttcaccaactatttttaggaggtgtatgg

SEQ ID NO: 196603 - DNA, 72 bp, Homo sapiens
agtcttacctcaaaatatcctactgtgaatcaatttcaccaactatttttaggaggtgtatggtggcctcta

SEQ ID NO: 196604 - DNA, 72 bp, Homo sapiens
aaaatatcctactgtgaatcaatttcaccaactatttttaggaggtgtatggtggcctctactggagtagta

SEQ ID NO: 196605 - DNA, 74 bp, Homo sapiens
ctgtgaatcaatttcaccaactatttttaggaggtgtatggtggcctctactggagtagtacgcagtcgattaa

SEQ ID NO: 196606 - DNA, 72 bp, Homo sapiens
aatttcaccaactatttttaggaggtgtatggtggcctctactggagtagtacgcagtcgattaagttatca

SEQ ID NO: 196607 - DNA, 71 bp, Homo sapiens
accaactatttttaggaggtgtatggtggcctctactggagtagtacgcagtcgattaagttatcagaaaa

SEQ ID NO: 196608 - DNA, 72 bp, Homo sapiens
tttaggaggtgtatggtggcctctactggagtagtacgcagtcgattaagttatcagaaaaggatccaactt

SEQ ID NO: 196609 - DNA, 74 bp, Homo sapiens
gtatggtggcctctactggagtagtacgcagtcgattaagttatcagaaaaggatccaactttctatcacaaaa

SEQ ID NO: 196610 - DNA, 71 bp, Homo sapiens
tactggagtagtacgcagtcgattaagttatcagaaaaggatccaactttctatcacaaaagacacgtttt

SEQ ID NO: 196611 - DNA, 70 bp, Homo sapiens
gtagtacgcagtcgattaagttatcagaaaaggatccaactttctatcacaaaagacacgtttttgtgtt

SEQ ID NO: 196612 - DNA, 72 bp, Homo sapiens
ggaaggaggcgggggttggctccagcccgtcttggccaccacactaacctcgccgctgctcgcgccgccgcc

SEQ ID NO: 196613 - DNA, 75 bp, Homo sapiens
gggttggctccagcccgtcttggccaccacactaacctcgccgctgctcgcgccgccgccgctgaacacttccat

SEQ ID NO: 196614 - DNA, 76 bp, Homo sapiens
tccagcccgtcttggccaccacactaacctcgccgctgctcgcgccgccgccgctgaacacttccatttctcggtc

SEQ ID NO: 196615 - DNA, 76 bp, Homo sapiens
tcttggccaccacactaacctcgccgctgctcgcgccgccgccgctgaacacttccatttctcggtcccagggctc

SEQ ID NO: 196616 - DNA, 75 bp, Homo sapiens
accacactaacctcgccgctgctcgcgccgccgccgctgaacacttccatttctcggtcccagggctcgtcctga

SEQ ID NO: 196617 - DNA, 78 bp, Homo sapiens
ccgctgctcgcgccgccgccgctgaacacttccatttctcggtcccagggctcgtcctgaggagcgaatggtagcatc

SEQ ID NO: 196618 - DNA, 76 bp, Homo sapiens
ctcgcgccgccgccgctgaacacttccatttctcggtcccagggctcgtcctgaggagcgaatggtagcatctccc

SEQ ID NO: 196619 - DNA, 78 bp, Homo sapiens
gctgaacacttccatttctcggtcccagggctcgtcctgaggagcgaatggtagcatctccccttcaggagcactcaa

SEQ ID NO: 196620 - DNA, 75 bp, Homo sapiens
acttccatttctcggtcccagggctcgtcctgaggagcgaatggtagcatctccccttcaggagcactcaaacag

SEQ ID NO: 196621 - DNA, 79 bp, Homo sapiens
tctcggtcccagggctcgtcctgaggagcgaatggtagcatctccccttcaggagcactcaaacaggagctgccgccta

SEQ ID NO: 196622 - DNA, 79 bp, Homo sapiens
agggctcgtcctgaggagcgaatggtagcatctccccttcaggagcactcaaacaggagctgccgcctaccgctggcgc

SEQ ID NO: 196623 - DNA, 80 bp, Homo sapiens
aggagcgaatggtagcatctccccttcaggagcactcaaacaggagctgccgcctaccgctggcgcggccgcgcatcctg

SEQ ID NO: 196624 - DNA, 81 bp, Homo sapiens
aatggtagcatctccccttcaggagcactcaaacaggagctgccgcctaccgctggcgcggccgcgcatcctgtctattga
